(19) United States
(12) Patent Application Publication
(10) Pub. No.: US 2004/0249144 A1
(43) Pub. Date: Dec. 9, 2004

(54) Regulated breast cancer genes

(76) Inventors: Zairen Sun, Rockville, MD (US); Xuan Li, Silver Spring, MD (US); Gilbert Jay, North Bethesda, MD (US); Karl F. Kovacs, Rockville, MD (US); Wufang Fan, Germantown, MD (US)

Correspondence Address: MILLEN, WHITE, ZELANO & BRANIGAN, P.C., 2200 CLARENDON BLVD., SUITE 1400, ARLINGTON, VA, 22201, US

(21) Appl. No.: 10/491,566

(22) PCT Filed: Oct. 2, 2002
(86) PCT No.: PCT/US02/31287

Related U.S. Application Data
(63) Continuation-in-part of application No. 10/144,194, filed on May 14, 2002.
(60) Provisional application No. 60/326,526, filed on Oct. 3, 2001.

(51) Int. Cl. C12Q 1/68; C07H 21/04; C07K 14/47

(52) U.S. Cl. 536/23.5; 435/6; 435/69.1; 435/320.1; 435/325; 530/350

(57) ABSTRACT

The present invention relates to all facets of novel polynucleotides, the polypeptides they encode, antibodies and specific binding partners thereto, and their applications to research, diagnosis, drug discovery, therapy, clinical medicine, forensic/science and medicine, etc. The polynucleotides are differentially-regulated in breast cancer and are therefore useful in variety of ways, including, but not limited to, as molecular markers, as drug targets, and for detecting, diagnosing, staging, monitoring, predisposition to, etc., diseases and conditions relating to breast cancer.

[0001] This application claims the benefit of U.S. Provisional Application Ser. No. 60/326,526, filed Oct. 3, 2001, and U.S. Ser. No. 10/144,194, filed May 14, 2002.

### DESCRIPTION OF THE DRAWINGS

[0002] FIGS. 1-20 show amino acid sequence alignments between polypeptides of the present invention, and polypeptides listed in public databases. SEQ ID NOS for the polypeptides of the present invention are listed in Table 3. Others are as follows: NP_{—}065728 (SEQ ID NO 93); XM_{—}046054 (SEQ ID NO 94); XM_{—}108902 (SEQ ID NO 95); NM_{—}015046 (SEQ ID NO 96); XM_{—}045169 (SEQ ID NO 97); XM_{—}035861 (SEQ ID NO 98); NM_{—}032141 (SEQ ID NO 99); XM_{—}054973 (SEQ ID NO 100); XM_{—}047529 (SEQ ID NO 101); NM_{—}012201 (SEQ ID NO 102); NM_{—}018114 (SEQ ID NO 103); NM_{—}002026 (SEQ ID NO 104); NM_{—}016569 (SEQ ID NO 105); XM_{—}051146 (SEQ ID NO 106); AAK83466 (SEQ ID NO 107); AAF19255 (SEQ ID NO 108); AAC97961 (SEQ ID NO 109); AK000274 (SEQ ID NO 110); NM_{—}016648 (SEQ ID NO. 111); BAA03747 (SEQ ID NO 112); XM_{—}047995 (SEQ ID NO 113); XM_{—}031992 (SEQ ID NO 114).

[0003] FIG. 21 shows the expression pattern of genes of the present invention in normal breast (top panel) and breast cancer (bottom panel) tissues. Twelve different tissue samples were analyzed for each gene using RT-PCR with gene-specific primers. In each case, gene expression was up-regulated in the cancer. The arrowhead indicates the position of the PCR product which corresponds to the gene. The lower less defined bands represent the primer dimers.

### DESCRIPTION OF THE INVENTION

[0004] The present invention relates to all facets of novel polynucleotides, the polypeptides they encode, antibodies and specific binding partners thereto, and their applications to research, diagnosis, drug discovery, therapy, clinical medicine, forensic science and medicine, etc. The polynucleotides are differentially regulated in breast cancer and are therefore useful in variety of ways, including, but not limited to, as molecular markers, as drug targets, and for detecting, diagnosing, staging, monitoring, prognosticating, preventing or treating, determining predisposition to, etc., diseases and conditions especially relating to breast cancer, but to other diseases and disorders, as well. The identification of specific genes, and groups of genes, expressed in pathways physiologically relevant to breast cancer permits the definition of functional and disease pathways, and the delineation of targets in these pathways which are useful in diagnostic, therapeutic, and clinical applications. The present invention also relates to methods of using the polynucleotides and related products (proteins, antibodies, etc.) in business and computer-related methods, e.g., advertising, displaying, offering, selling, etc., such products for sale, commercial use, licensing, etc.

[0005] Breast Cancer

[0006] Breast cancer is the second leading cause of cancer death for all women (after lung cancer), and the leading overall cause of death in women between the ages of 40 and 55. In 2000, several hundred thousand new cases of female invasive breast cancer were diagnosed, and about 40,000 women died from the disease. Nearly 43,000 cases of female in situ (preinvasive) breast cancer were diagnosed in 2000. There is not one single disease that can be called breast cancer. Instead, it is highly heterogeneous, exhibiting a wide range of different phenotypes and genotypes. No single gene or protein has been identified which is responsible for the etiology of all breast cancers. It is likely that diagnostic and prognostic markers for breast cancer disease will involve the identification and use of many different genes and gene products to reflect its multifactorial origin.

[0007] The normal female breast comprises ducts and lobuloalveolar structures surrounded by basement membranes and collagenous stroma with fibroblasts, vessels, and fat. The basic unit of function in the breast are the lobuloalveolar structures which produce the milk secretions. Each lobule drains into a lactiferous duct that empties into a lactiferous sinus beneath the nipple. The ducts are lined with epithelial cells, containing few mitochondria and sparse endoplasmic reticulum. The lobules contain luminal epithelial cells, basal epithelial cells, and myoepithelial cells. The basal and epithelial cells are sometimes grouped together. The luminal cells can be differentiated immuno-histochemically from the myoepithelial cells by their expression of keratins. The luminal cells stain with antibodies to keratin 5/6; the myoepithelial cells stains with antibodies against keratin 8/18. In addition to the presence of these cells types in the breast, there are endothelial cells associated with blood vessels, stromal cells that surround the lobular structures, adipose cells, and blood cells, such as T-lymphocytes and macrophages.

[0008] Breast carcinoma can be classified into two basic types, noninvasive (non-infiltrating) and invasive. Noninvasive carcinoma includes, e.g., intraductal carcinoma (also known as ductal carcinoma in situ or “DCIS”), intraductal papillary carcinoma, and lobular carcinoma in situ. Invasive carcinoma includes, e.g., invasive ductal carcinoma (“IDC”), invasive lobular carcinoma, medullary carcinoma, colloid carcinoma (mucinous carcinoma), Paget's disease, tubular carcinoma, adenoid cystic carcinoma, invasive comedocarcinoma, apocrine carcinoma, and invasive papillary carcinoma. See, also, Cancer, Principles and Practice of Oncology, DeVita et al., ed., J. B. Lippincott Company, 1982, Pages 914-922. The different cancers can generally be distinguished histologically from each other.

[0009] Over 90% of breast cancers arise in the ducts. As long as it remains with the ductal basement membranes, it is classified as a non-infiltrating or non-invasive carcinoma. DCIS is a common example. An invasive or infiltrating carcinoma shows a marked increase in dense fibrous tissue stroma, giving the tissue a hard consistency. IDC is one of the more common types of an invasive carcinoma. Frequently, an infiltrating carcinoma becomes invaded with blood and lymphatic vessels as it increases in size and malignancy. The tumor cells fill the ducts, plugging them, and invade the surrounding stroma. For general description of breast pathology, see, e.g., Robins Pathological Basis of Disease, Cotran et al., 4^{th} Edition, W. B. Saunders Company, 1989, Chapter 25.

[0010] The progression of a cancer, from its origin to a full-blown malignancy, is the subject of intense study. Hyperplasia is generally believed to precede at least some cancers, but not all hyperplasia leads to cancer, and the relationship between the two is not well understood. One hallmark of a hyperplasia that leads to cancer may be the occurrence of genomic instability, and other factors which lead to uncoupling of the cell cycle.

[0011] Intraepithelial neoplasia is one of the first detectable signs of a breast cancer, characterized by its confinement to the duct epithelia. It can also be referred to as preinvasive neoplasia, precancer, dysplasia, or CIS. See, e.g., Boone et al., Proc. Soc. Exp. Biol. Med., 216:151-165, 1997. An intraepithelial neoplasia generally consists of multiple foci of an abnormal clonal expansion of neoplastic cells. The development of the neoplasia is manifested by an increasing size of the lesion and a greater degree of cytonuclear morphological aberration, as it progresses from low grade to high grade. See, e.g., Bacus et al., Cancer Epid. Biom. Prevent., 8:1087-1094, 1999. An early grade can be referred to as an intraductal proliferation (IDP). More advanced, pre-invasive lesions are DCIS and LCIS (lobular carcinoma in situ). It is believed that DCIS and LCIS are precursor lesions of invasive breast cancer, such as IDC. See, e.g., Buerger al., Mol. Pathol., 53:118-121, 2000.

[0012] Breast cancers can be both staged and graded. Stage is based on the tumor and size and whether the lymph nodes are involved with the tumor. Tumor grade refers to the tumor cells' appearance under the microscope, and how closely it resembles normal tissue of the same type. If the tumor cells look normal, then it can be termed “low grade.” High grade cells look markedly different from normal cells. High grade tumors tend to behave more aggressively than lower grade.

[0013] The most widely used clinical staging system for breast cancer is one adopted by the UICC (International Union against Cancer). This system incorporates the TNM (t, tumor; N, nodes; M, metastases) classification using tumor size, involvement of the chest wall and skin, inflammatory cancer, involvement of nodes, evidence of metastases. See, e.g., Sainsbury et al., BMJ, 321:745-750, 2000. Other staging and grading systems can also be used, e.g., Bloom and Richardson grade (British J. Cancer, 11:359-377, 1957), Columbia Clinical Classification (CCC), Van Nuys (VN), etc. Grading systems have also been devised based on image analysis of neoplastic and normal cells. Bacus et al. (Cancer Epid. Biom. Prevent., 8:1087-1094, 1999) have described an image morphometric nuclear grading system for intraepitheliam neoplastic lesions, such as DCIS, which provides objective criteria to assess tumor grade. See, also, Schwartz, Human Pathol., 28:1798-1802, 1997, for a grading system for DCIS. FISH has also been used to diagnose cancers based on chromosomal aberrations. See, e.g., Komoike et al., Breast Cancer, 7:332-336, 2000.

[0014] Various genetic bases for breast cancer have begun to be identified. For instance, BRCA1, BRCA2, ATM, PTEN/MMAC1 (e.g., Ali et al., J. Natl. Cancer Inst., 91:1922-1932, 1999), MLH2, MSH2, TP53 (e.g., Done et al., Cancer Res., 58:785-789, 1998), and STK11 are associated with a higher risk of cancer. Other genes involved in breast cancer include, e.g., myc, cyclin D1(e.g., Weinstat-Saslow et al., Nature Med., 1:1257-1260, 1995), and c-erb-B2.

[0015] A continuing goal is to characterize the gene expression patterns of the various carcinoma forms in order to genetically differentiate them, providing important guidance in preventing and treating cancer. For instance, the c-erb-B2 gene codes for a transmembrane protein which is over-expressed in about 20-30% of all breast cancers. Based on this information, immunotherapy using an anti-c-erb-B2 antibody has been developed and successfully used to treat breast cancer. See, e.g., Pegram and Slamon, Semin Oncol., 5, Suppl 9:13, 2000. Molecular pictures of cancer, such as the pattern of up-regulated genes identified herein, provide an important tool for molecularly dissecting and classifying cancer, identifying drug targets, providing prognosis and therapeutic information, etc. For instance, an array of polynucleotides corresponding to genes differentially regulated in breast cancer can be used to screen tissue samples for the existence of cancer, to categorize the cancer (e.g., by the particular pattern observed), to grade the cancer (e.g., by the number of up-regulated genes and their amounts of expression), to identify the source of a secondary tumor, to screen for metastatic cells, etc. These arrays can be used in combination with other markers, e.g., keratin immunophenotyping (e.g., CK 5/6), c-erb-B2, estrogen receptor (ER) status, etc., and any of the grading systems mentioned above.

[0016] Tables 1 and 4 list differentially regulated genes, the cellular locations of the polypeptides coded for by the genes, and their corresponding functional and structural polypeptide domains. Table 3 summarizes the expression profile of these genes.

[0017] Membrane (i.e., cell-surface) proteins coded for by up-regulated genes (e.g., BCU0067, BCU0149, BCU0721, BCU41, BCU770, BCU224; see, Table 1 and 4 for others) are useful targets for antibodies and other binding partners (e.g., ligands, aptamers, small peptides, etc.) to selectively target agents to a breast cancer tissue for any purpose, included, but not limited to, imaging, therapeutic, diagnostic, drug delivery, gene therapy, etc. For example, binding partners, such as antibodies, can be used to treat carcinomas in analogy to how c-erbB-2 antibodies are used to breast cancer. Membrane (e.g., when shed into the blood and other fluid) and extracellular proteins can also be used as diagnostic markers for cancer, and to assess the progress of the disease, e.g., in analogy to how PSA levels are used to diagnose prostate cancer. Useful antibodies or other binding partners include those that are specific for parts of the polypeptide which are exposed extracellularly.

[0018] Polynucleotides of the present invention can also be used to detect metastatic cells in the blood. For instance, BCU0120, BCU0156, BCU0258, BCU0475, BCU0504, BCU0571, BCU0770, BCU0840, BCU0862, BCU0918, and BCU0205 are absent from peripheral blood cells, and can therefore be used in diagnostic tests to assess whether breast cancer cells have metastasized from the primary site.

[0019] Polynucleotides of the present invention have been mapped to specific chromosomal bands. Different human disorders are associated with these chromosome locations. See, Table 2. The polynucleotides and polypeptides they encode can be used as linkage markers, diagnostic targets, therapeutic targets, for any of the mentioned disorders, as well as any disorders or genes mapping in proximity to them. Of particular interest are those genes which map to cancer loci, such as BCU0371, BCU0720, BCU0721, BCU0730, BCU0862, and BCU0715.

[0020] BCU0715 represents alternative splice forms of a calpain inhibitor. Calpains are neutral cysteine proteases. Calpain inhibitors have a number of uses, e.g., to inhibit the formation of cataracts (e.g., Current Eye Res., 22(4): 280-285, 2001), to treat brain ischemia (e.g., NeuroReport, 12:3927-3931, 1999), to treat and/or prevent neuronal damage, including brain, ear, eye, and other sensory organs (e.g., Brain Res., 850(1-2): 23443, 1999), to treat and/or prevent muscle degeneration (e.g., Stracher, Ann. N.Y. Acad. Sci., 884:52-9, 1999), to treat and/or prevent tinnitus (Shulman, Int. Tinnitus J., 4(2): 134-140, 1998), to treat myocardial injury, to identify calpain inhibitors, etc. Calpain inhibitory activity can be measured routinely, e.g., by measuring the inhibition of a neutral cysteine proteases (see, e.g., Wronski et al., J. Neural Transm., 107:145-157, 2000; Meyer et al., Biochem. J., 314 (Pt. 2):511-519, 1996).

[0021] Bcd215

[0022] Bcd215 (related to NM_{—}001871) codes for a carboxypeptidase having 251 amino acids. The nucleotide and amino acid sequences of Bcd215 are shown in SEQ ID NOS 125-126. It contains a Zn_pept domain at about amino acid positions 119-229, and a carboxypeptidase activation domain at about amino acid positions 26-105.

[0023] All or part of Bcd215 is located in genomic DNA represented by AC024897, BAC-ID: RP11-505J9, and NT_{—}005616. The gene contains at least 8 exons. The present invention relates to any isolated introns and exons that are present in such clone. Such introns and exons can be routinely determined. Bcd215 maps to chromosomal band 3q24.1. As indicated by its expression profile, Bcd215 is down-regulated in breast cancer. In addition to its role in breast cancer, Bcd215 is also expressed in other tissues, and thus is associated with other phenotypes, including other diseases and conditions. These, include, e.g., Hermansky-Pudlak syndrome, leukemia and other types of cancers, including adenocarcinoma, Usher syndrome, and Seckel syndrome. Nucleic acids of the present invention can be used as linkage markers, diagnostic targets, therapeutic targets, for any of the mentioned disorders, as well as any disorders or genes mapping in proximity to it.

[0024] Bcu41

[0025] Bcu41 codes for a 98 amino acid transmembrane polypeptide. The nucleotide and amino acid sequences of Bcu41 are shown in SEQ ID NOS 115-116. The transmembrane domain is located amino acid positions 65-87, and there is a Zinc carboxypeptidaseA metalloprotease (M14 family) motif at amino acids 3646. It is also related to mouse AK018709.

[0026] All or part of Bcu41 is located in genomic DNA represented by GenBank ID: AC040977, BAC ID: RP11-589P10, and Contig ID: NT_{—}010747. The gene contains at least three exons. The present invention relates to any isolated introns and exons that are present in such clone. Such introns and exons can be routinely determined. Bcu41 maps to chromosomal band 17q13.1, coincident with the location of a breast cancer tumor suppressor gene.

[0027] Bcu259

[0028] Bcu259 (related to NM_{—}032926) codes for a nuclear protein containing 200 amino acids. The nucleotide and amino acid sequences of Bcu259 are shown in SEQ ID NOS 131-132. It contains a bipartite nuclear localization signal domain at about amino acids 96-116.

[0029] All or part of Bcu259 is located in genomic DNA represented by GenBank ID: AC025230, BAC-ID: RP11-193B20, GenBank ID: Z73965 (DXS366-DXS87), and BAC-ID: Cosmid V857G6. The gene contains at least 3 exons. The present invention relates to any isolated introns and exons that are present in such clone. Such introns and exons can be routinely determined. Bcu259 maps to chromosomal band Xq22-q23.

[0030] As indicated by its expression profile, Bcu259 is differentially-regulated in breast cancer. In addition to its role in breast cancer, Bcu259 is also expressed in other tissues, and thus is associated with other phenotypes, including other diseases and conditions. These, include, e.g., Mohr-Tranebjaerg syndrome, perceptive congenital deafness X-linked 2, and fatal X-linked ataxia with deafness and loss of vision. Nucleic acids of the present invention can be used as linkage markers, diagnostic targets, therapeutic targets, for any of the mentioned disorders, as well as any disorders or genes mapping in proximity to it.

[0031] Bcu656

[0032] Bcu656 is a noncoding transcript. The nucleotide sequence of Bcu0656 is shown in SEQ ID NOS 117. All or part of Bcu0656 is located in genomic DNA represented by GenBank ID: AC007444,BAC ID: RP11-340F1, and Contig ID: NT_{—}007819. Bcu656 maps to chromosomal band 7p14.

[0033] Bcu924

[0034] Bcu924 codes for a polypeptide containing 88 amino acids. The nucleotide and amino acid sequences of Bcu924 are shown in SEQ ID NOS 139-140.

[0035] All or part of Bcu924 is located in genomic DNA represented by GenBank ID: AC012213, BAC-ID: RP11-1C8, and Contig ID: NT_{—}008005. The present invention relates to any isolated introns and exons that are present in such gene. Such introns and exons can be routinely determined. Bcu924 maps to chromosomal band 8q22-q22.3.

[0036] Bcu93

[0037] Bcu93 codes for a ribosomal protein, L23a (RPL23A) containing 156 amino acids. The nucleotide and amino acid sequences of Bcu93 are shown in SEQ ID NOS 120-121. See, e.g., Fan et al., Immunogenetics, 44:97-103, 1996; Fan et al., Genomics, 46:234-23, 1996. Polymorphisms of it are listed in Table 2.

[0038] Bcu931

[0039] Bcu931 (related to Hs.28661 and AK000933) codes for a small Ras-related GTP-binding protein involved, e.g., in the regulation of vesicular transport with exocytic and endocytic pathways. The nucleotide and amino acid sequences (e.g., containing 366 amino acids) of Bcu931 are shown in SEQ ID NOS 123-124. It has the following domains: Rab GDP-dissociation inhibitor (GDI) domain-I at about amino acid positions 3-19, Rab GDP-dissociation inhibitor (GDI) domain-2 at about amino acid positions 3-91, Rab GDP-dissociation inhibitor (GDI) domain-3 at about amino acid positions 91-113, Rab escort (choroideraemia) protein domain-1 at about at amino acid positions 6-25, Rab escort (choroideraemia) protein domain-2 at about amino acid positions 63-80, Rab escort (choroideraemia) protein domain-3 at about amino acid positions 123-151, Rab escort (choroideraemia) protein domain-4 at about amino acid positions 255-275, Rab escort (choroideraemia) protein domain-5 at about amino acid positions 277-298, and Rab escort (choroideraemia) protein domain-6 at about amino acid positions 312-332.

[0040] All or part of Bcu931 is located in genomic DNA represented by GenBank ID: AL133390, BAC ID: RP1-317G22, and Contig ID: NT_{—}004771. The present invention relates to any isolated introns and exons that are present in the gene. Such introns and exons can be routinely determined. Bcu931 maps to chromosomal band 1q43.

[0041] Bcu1040

[0042] Bcu1040 (related to Hs.20954) codes for a 95 amino acid polypeptide. The nucleotide and amino acid sequences of Bcu1040 are shown in SEQ ID NOS 137-138. All or part of Bcu1040 is located in genomic DNA represented by GenBank ID: AC022150 and BAC ID: CTD-3099C6. Bcu1040 maps to chromosomal band 19q13.41.

[0043] As indicated by its expression profile, Bcu 1040 is differentially-regulated in breast cancer. In addition to its role in cancer, Bcu1040 is also expressed in other tissues, and thus is associated with other phenotypes, including other diseases and conditions. These, include, e.g., retinosa pigmentosa and spinocerebellar ataxia. Nucleic acids of the present invention can be used as linkage markers, diagnostic targets, therapeutic targets, for any of the mentioned disorders, as well as any disorders or genes mapping in proximity to it.

[0044] Bcu224

[0045] Bcu224 (related to NM_{—}001203) codes for bone morphogenetic protein receptor type-IB containing 502 amino acids. The nucleotide and amino acid sequences of Bcu224 are shown in SEQ ID NOS 129-130. It contains a signal peptide domain at about amino acids 1-23, an activin receptor domain at about amino acids 17-110, a transmembrane domain at about amino acids 126-148, a GS motif at about amino acids 174-204, and a serine-threonine kinase domain at about amino acids 204-491. It is homologous to mouse NM_{—}007560.

[0046] All or part of Bcu224 is located in genomic DNA represented by GenBank ID: AC023177, BAC-ID: RP11-231B13, and Contig ID: NT_{—}006279. The gene contains at least 14 exons. The present invention relates to any isolated introns and exons that are present in such clone. Such introns and exons can be routinely determined. Bcu224 maps to chromosomal band 4q22-q24.

[0047] As indicated by its expression profile, Bcu224 is differentially-regulated in breast cancer. In addition to its role in breast cancer, Bcu224 is also expressed in other tissues, and thus is associated with other phenotypes, including other diseases and conditions. These, include, e.g., Wolfram syndrome-2 and mucolipidosis II. Nucleic acids of the present invention can be used as linkage markers, diagnostic targets, therapeutic targets, for any of the mentioned disorders, as well as any disorders or genes mapping in proximity to it.

[0048] Bcu616

[0049] Bcu616 codes for a polypeptide containing 90 amino acids. The nucleotide and amino acid sequences of Bcu616 are shown in SEQ ID NOS 133-134. Polymorphisms of it are listed in Table 2. The polypeptide coded for by Bcu616 exhibits sequence identity to XM_{—}003882, AK002985, and Hs.38114.

[0050] All or part of Bcu616 is located in genomic DNA represented by AC008795, BAC-ID CTD-2052F 19, and NT_{—}006679. The gene contains at least 2 exons. The present invention relates to any isolated introns and exons that are present in such clone. Such introns and exons can be routinely determined. Bcu616 maps to chromosomal band 5p13-p14. As indicated by its expression profile, Bcu616 is differentially-regulated in breast cancer. In addition to its role in breast cancer, Bcu616 is also expressed in other tissues, and thus is associated with other phenotypes, including other diseases and conditions. These, include, e.g., severe combined immunodeficiency (T-cell negative, B-cell/natural killer cell-positive type), and other types of cancer, including lung cancers. Nucleic acids of the present invention can be used as linkage markers, diagnostic targets, therapeutic targets, for any of the mentioned disorders, as well as any disorders or genes mapping in proximity to it.

[0051] Bcu631

[0052] Bcu631 (related to Hs. 101007 and Hs.5909) codes for a polypeptide containing 85 amino acids. The nucleotide and amino acid sequences of Bcu631 are shown in SEQ ID NOS 135-136.

[0053] All or part of Bcu631 is located in genomic DNA represented by AC002394, BAC-ID CIT987SK-A-211C6, and NT_{—}027181. The gene contains at least 2 exons. The present invention relates to any isolated introns and exons that are present in such clone. Such introns and exons can be routinely determined. Bcu631 maps to chromosomal band 16p12.3-12.1.

[0054] As indicated by its expression profile, Bcu631 is differentially-regulated in breast cancer. In addition to its role in breast and other cancers, Bcu631 is also expressed in other tissues, and thus is associated with other phenotypes, including other diseases and conditions. These, include, e.g., Retinitis pigmentosa 22, Microhydranencephaly (MHAC), Medullary Cystic Kidney Disease 2 (MCKD2), Paroxysmal kinesigenic choreoathetosis, Brody myopathy, Ceroid-lipofuscinosis neuronal-3, Glycogenosis, Familial Mitral valve prolapse, familial, susceptibility to Atopy, Convulsions, Arthrocutaneouveal granulomatosis. Nucleic acids of the present invention can be used as linkage markers, diagnostic targets, therapeutic targets, for any of the mentioned disorders, as well as any disorders or genes mapping in proximity to it.

[0055] Bcu738

[0056] Bcu738 (related to Hs.81281 and U79285) codes for an 87 amino acid polypeptide. The nucleotide and amino acid sequences of Bcu738 are shown in SEQ ID NOS 118-119. It contains a ribosomal protein S21 domain at about amino acid positions 10-62. The polypeptide coded for by Bcu738 exhibits sequence identity to U79285.

[0057] All or part of Bcu738 is located in genomic DNA represented by AL365403, BAC-ID RP5-835F16, and NT_{—}004698. The gene contains at least 2 exons. The present invention relates to any isolated introns and exons that are present in such clone. Such introns and exons can be routinely determined. Bcu738 maps to chromosomal band 1q12.

[0058] As indicated by its expression profile, Bcu738 is differentially-regulated in breast cancer. In addition to its role in breast and other cancers, Bcu738 is also expressed in other tissues, and thus is associated with other phenotypes, including other diseases and conditions. These, include, e.g., Phosphoglycerate dehydrogenase deficiency and Cone-rod dystrophy. Nucleic acids of the present invention can be used as linkage markers, diagnostic targets, therapeutic targets, for any of the mentioned disorders, as well as any disorders or genes mapping in proximity to it.

[0059] Bcu921

[0060] Bcu921 (related to AF220294) codes for a polypeptide having 190 amino acids. The nucleotide and amino acid sequences of Bcu921 are shown in SEQ ID NOS 127-128. It has internal repeats at amino acid positions 17-95 and 84-189. It is also related to the rat gene represented by AF220294 (Rsp29).

[0061] All or part of Bcu921 is located in genomic DNA represented by GenBank ID: AL031009 (1-418 bp), BAC-ID1:431H6 (1-418 bp), GenBank ID2: AL03171 (419-3034 bp), BAC-ID2: LA16-329F2, and Contig ID: NT_{—}010388. The gene contains at least 5 exons. The present invention relates to any isolated introns and exons that are present in such clone. Such introns and exons can be routinely determined. Bcu921 maps to chromosomal band 16p13.3.

[0062] As indicated by its expression profile, Bcu921 is differentially-regulated in breast cancer. In addition to its role in breast cancer, Bcu921 is also expressed in other tissues, and thus is associated with other phenotypes, including other diseases and conditions. These, include, e.g., Microphthalmia-cataract, Hemoglobin H-related mental retardation, Polycystic kidney disease, Myoclonic Epilepsy, and Microhydranencephaly (MHAC). Nucleic acids of the present invention can be used as linkage markers, diagnostic targets, therapeutic targets, for any of the mentioned disorders, as well as any disorders or genes mapping in proximity to it.

[0063] The present invention relates to the complete polynucleotide and polypeptide sequences disclosed herein, as well as fragments thereof. Useful fragments include those which are unique and which do not overlap any known gene (e.g., amino acids residues 1-105 of BCU0021 of SEQ ID NO 8), which overlap with a known sequence (e.g., amino acid residues 106-404 of BCU0021 of SEQ ID NO 8), which span alternative splice junctions (e.g., comprising amino acid residues 166-167 of BCU0156 of SEQ ID NO 22), which are unique to a public sequence as indicated in the Figures (e.g., amino acids 167-185 of XM_{—}108902 of SEQ ID NO 95), which span an alternative splice junction of a public sequence (e.g., 258-259 of XM_{—}108902 of SEQ ID NO 95), etc. Unique sequences can also be described as being specific for a gene because they are characteristic of the gene, but not related genes. The unique or specific sequences included polypeptide sequences, coding nucleotide sequences (e.g., as illustrated in the figures), and non-coding nucleotide sequences.

[0064] Below, for illustration, are some examples of polypeptides (included are the polynucleotides which encode them); however, the present invention includes all fragments, especially of the categories mentioned above are exemplified below.

[0065] BCU0021 (SEQ ID NO 7-8): polypeptides comprising, consisting of, or consisting essentially of about amino acids 1-105, polypeptide fragments thereof, and polynucleotides encoding said polypeptides;

[0066] BCU0067 (SEQ ID NO 9-10): polypeptides comprising, consisting of, or consisting essentially of about amino acids 1-112, polypeptide fragments thereof, and polynucleotides encoding said polypeptides;

[0067] BCU0156 (SEQ ID NO 21-22): polypeptides comprising, consisting of, or consisting essentially of about amino acids 240-279, 1759-1849, polypeptide fragments thereof, and polynucleotides encoding said polypeptides;

[0068] BCU0258 (SEQ ID NO 23-24): polypeptides comprising, consisting of, or consisting essentially of about amino acids 1-646, 860-1078, polypeptide fragments thereof, and polynucleotides encoding said polypeptides;

[0069] BCU0343 (SEQ ID NO 25-26): polypeptides comprising, consisting of, or consisting essentially of about amino acids 1-10, polypeptide fragments thereof, and polynucleotides encoding said polypeptides;

[0070] BCU0408 (SEQ ID NO 31-32): polypeptides comprising, consisting of, or consisting essentially of about amino acids 141-143, polypeptide fragments thereof, and polynucleotides encoding said polypeptides;

[0071] BCU0504 (SEQ ID NO 35-36): polypeptides comprising, consisting of, or consisting essentially of about amino acids 39-41, polypeptide fragments thereof, and polynucleotides encoding said polypeptides;

[0072] BCU0720 (SEQ ID NO 3940): polypeptides comprising, consisting of, or consisting essentially of about amino acids 1-504, polypeptide fragments thereof, and polynucleotides encoding said polypeptides;

[0073] BCU0721 (SEQ ID NO 41-42): polypeptides comprising, consisting of, or consisting essentially of about amino acids 27-35, 225, 526, 702, 707, polypeptide fragments thereof, and polynucleotides encoding said polypeptides;

[0074] BCU0730A (SEQ ID NO 43-44): polypeptides comprising, consisting of, or consisting essentially of about amino acids 27, 133-543, polypeptide fragments thereof, and polynucleotides encoding said polypeptides;

[0075] BCU0730B (SEQ ID NO 4546): polypeptides comprising, consisting of, or consisting essentially of about amino acids 27, 133-516, polypeptide fragments thereof, and polynucleotides encoding said polypeptides;

[0076] BCU0730C (SEQ ID NO 47-48): polypeptides comprising, consisting of, or consisting essentially of about amino acids 27, 133-538, polypeptide fragments thereof, and polynucleotides encoding said polypeptides;

[0077] BCU0730D (SEQ ID NO 49-50): polypeptides comprising, consisting of, or consisting essentially of about amino acids 27, 57-83, 160-574, polypeptide fragments thereof, and polynucleotides encoding said polypeptides;

[0078] BCU0770 (SEQ ID NO 51-52): polypeptides comprising, consisting of, or consisting essentially of about amino acids 1-37, 433463, polypeptide fragments thereof, and polynucleotides encoding said polypeptides;

[0079] BCU0840 (SEQ ID NO 53-54): polypeptides comprising, consisting of, or consisting essentially of about amino acids 220-221, 470-600, 639-655, polypeptide fragments thereof, and polynucleotides encoding said polypeptides;

[0080] BCU0947 (SEQ ID NO 61-62): polypeptides comprising, consisting of, or consisting essentially of about amino acids 1-1753, polypeptide fragments thereof, and polynucleotides encoding said polypeptides;

[0081] BCU1034 (SEQ ID NO 63-64): polypeptides comprising, consisting of, or consisting essentially of about amino acids 1-41, 42-59, 126, 195, polypeptide fragments thereof, and polynucleotides encoding said polypeptides;

[0082] BCU0988A (SEQ ID NO 83-84): polypeptides comprising, consisting of, or consisting essentially of about amino acids 1-59, 328-391, polypeptide fragments thereof, and polynucleotides encoding said polypeptides;

[0083] BCU0988B (SEQ ID NO 85-86): polypeptides comprising, consisting of, or consisting essentially of about amino acids 1-59, polypeptide fragments thereof, and polynucleotides encoding said polypeptides;

[0084] BCU0586 (SEQ ID NO 71-72): polypeptides comprising, consisting of, or consisting essentially of about amino acids 1-704, 705-711, polypeptide fragments thereof, and polynucleotides encoding said polypeptides;

[0085] BCU0715A (SEQ ID NO 73-74): polypeptides comprising, consisting of, or consisting essentially of about amino acids 1-113, 491, 675, polypeptide fragments thereof, and polynucleotides encoding said polypeptides;

[0086] BCU0715B (SEQ ID NO 75-76): polypeptides comprising, consisting of, or consisting essentially of about amino acids 91-92, polypeptide fragments thereof, and polynucleotides encoding said polypeptides;

[0087] BCU0715C (SEQ ID NO 77-78): polypeptides comprising, consisting of, or consisting essentially of about amino acids 104-105, polypeptide fragments thereof, and polynucleotides encoding said polypeptides;

[0088] BCU0205A (SEQ ID NO 79-80): polypeptides comprising, consisting of, or consisting essentially of about amino acids 1-85, polypeptide fragments thereof, and polynucleotides encoding said polypeptides;

[0089] BCU0205B (SEQ ID NO 81-82): polypeptides comprising, consisting of, or consisting essentially of about amino acids 1-79, 80-167, 168-945, polypeptide fragments thereof, and polynucleotides encoding said polypeptides;

[0090] BCU0518 (SEQ ID NO 87-88): polypeptides comprising, consisting of, or consisting essentially of about amino acids 1-35, polypeptide fragments thereof, and polynucleotides encoding said polypeptides.

[0091] Nucleic Acids

[0092] In accordance with the present invention, genes have been identified which are differentially expressed in breast cancer. These genes can be further divided into groups based on additional characteristics of their expression and the tissues in which they are expressed. For instance, genes can be further subdivided based on the stage and/or grade of the cancer in which they are expressed. Genes can also be grouped based on their penetrance in a breast cancer, e.g., expressed in all breast cancers examined, expressed in a certain percentage of breast cancers examined, etc. These groupings do not restrict or limit the use such genes in therapeutic, diagnostic, prognostic, etc., applications. For instance, a gene which is expressed in only some cancers (e.g., incompletely penetrant) may be useful in therapeutic applications to treat a subset of cancers. Similarly, a co-penetrant gene, or a gene which is expressed in breast and other normal tissues, may be useful as a therapeutic or diagnostic, even if its expression pattern is not highly breast cancer specific. Thus, the uses of the genes or their products are not limited by their patterns of expression.

[0093] By the phrase “differential expression,” it is meant that the levels of expression of a gene, as measured by its transcription or translation product, are different depending upon the specific cell-type or tissue (e.g., in an averaging assay that looks at a population of cells). There are no absolute amounts by which the gene expression levels must vary, as long as the differences are measurable.

[0094] The phrase “up-regulated” indicates that an mRNA transcript or other nucleic acid corresponding to a polynucleotide of the present invention is expressed in larger amounts in a cancer as compared to the same transcript expressed in normal cells from which the cancer was derived. In general, up-regulation can be assessed by any suitable method, including any of the nucleic acid detection and hybridization methods mentioned below, as well as polypeptide-based methods. Up-regulation also includes going from substantially no expression in a normal tissue, from detectable expression in a normal tissue, from significant expression in a normal tissue, to higher levels in the cancer.

[0095] The phrase “down-regulated” indicates that an mRNA transcript or other nucleic acid corresponding to a polynucleotide of the present invention is expressed in lower amounts in a cancer as compared to the same transcript expressed in normal cells from which the cancer was derived. A down-regulated gene can show no detectable expression, or any amount of expression which is less than the gene's expression in normal tissue.

[0096] Differential regulation can be determined by any suitable method, e.g., by comparing its abundance per gram of RNA (e.g., total RNA, polyadenylated mRNA, etc.) extracted from a breast tissue in comparison to the corresponding normal tissue. The normal tissue can be from the same or different individual or source. For convenience, it can be supplied as a separate component or in a kit in combination with probes and other reagents for detecting genes. The quantity by which a nucleic acid is differentially-regulated can be any value, e.g., about 10% more or less of normal expression, about 50% more or less of normal expression, 2-fold more or less, 5-fold more or less, 10-fold more or less, etc.

[0097] The amount of transcript can also be compared to a different gene in the same sample, especially a gene whose abundance is known and substantially no different in its expression between normal and cancer cells (e.g., a “control” gene). If represented as a ratio, with the quantity of differentially-regulated gene transcript in the numerator and the control gene transcript in the denominator, the ratio would be larger, e.g., in breast cancer than in a sample from normal breast tissue.

[0098] Differential-regulation can arise through a number of different mechanisms. The present invention is not bound by any specific way through which it occurs. Differential-regulation of a polynucleotide can occur, e.g., by modulating (1) transcriptional rate of the gene (e.g., increasing its rate, inducing or stimulating its transcription from a basal, low-level rate, etc.), (2) the post-transcriptional processing of RNA transcripts, (3) the transport of RNA from the nucleus into the cytoplasm, (4) the RNA nuclear and cytoplasmic turnover (e.g., by virtue of having higher stability or resistance to degradation), and combinations thereof. See, e.g., Tollervey and Caceras, Cell, 103:703-709, 2000.

[0099] A differentially-regulated polynucleotide is useful in a variety of different applications as described in greater details below. Because it is more abundant in cancer, it and its expression products can be used in a diagnostic test to assay for the presence of cancer, e.g., in tissue sections, in a biopsy sample, in total RNA, in lymph, in blood, etc. Differentially-regulated polynucleotides and polypeptides can be used individually, or in groups, to assess the cancer, e.g., to determine the specific type of cancer, its stage of development, the nature of the genetic defect, etc., or to assess the efficacy of a treatment modality. How to use polynucleotides in diagnostic and prognostic assays is discussed below. In addition, the polynucleotides and the polypeptides they encode, can serve as a target for therapy or drug discovery. A polypeptide, coded for by a differentially-regulated polynucleotide, which is displayed on the cell-surface, can be a target for immunotherapy to destroy, inhibit, etc., the diseased tissue. Differentially-regulated transcripts can also be used in drug discovery schemes to identify pharmacological agents which suppress, inhibit, etc., their differential-regulation, thereby preventing the phenotype associated with their expression. Thus, a differentially-regulated polynucleotide and its expression products of the present invention have significant applications in diagnostic, therapeutic, prognostic, drug development, and related areas. The expression patterns of the differentially expressed genes disclosed herein can be described as a “fingerprint” in that they are a distinctive pattern displayed by a cancer. Just as with a fingerprint, an expression pattern can be used as a unique identifier to characterize the status of a tissue sample. The list of genes represented SEQ ID NOS 1, 3, 5, 7, 9, 11, 13, 15, 17, 19, 21, 23, 25, 27, 29, 31, 33, 35, 37, 39, 41, 43, 45, 47, 49, 51, 53, 55, 57, 59, 61, 63, 65, 67, 69, 71, 73, 75, 77, 79, 81, 83, 85, 87, 89, 91, 115, 117, 118, 120, 123, 125, 127, 129, 131, 133, 135, 137, 139, 141, 143, 145, and/or 147 provides an example of a cell expression profile for a breast cancer. It can be used as a point of reference to compare and characterize unknown samples and samples for which further information is sought. Tissue fingerprints can be used in many ways, e.g., to classify an unknown tissue as being a breast cancer, to determine the origin of a particular cancer (e.g., the origin of metastatic cells), to determine the presence of a cancer in a biopsy sample, to assess the efficacy of a cancer therapy in a human patient or a non-human animal model, to detect circulating cancer cells in blood or a lymph node biopsy, etc. While the expression profile of the complete gene set represented by SEQ ID NOS 1, 3, 5, 7, 9, 11, 13, 15, 17, 19, 21, 23, 25, 27, 29, 31, 33, 35, 37, 39, 41, 43, 45, 47, 49, 51, 53, 55, 57, 59, 61, 63, 65, 67, 69, 71, 73, 75, 77, 79, 81, 83, 85, 87, 89, and 91, 115, 117, 118, 120, 123, 125, 127, 129, 131, 133, 135, 137, 139, 141, 143, 145, and/or 147 may be most informative, a fingerprint containing expression information from less than the full collection can be useful, as well. In the same way that an incomplete fingerprint may contain enough of the pattern of whorls, arches, loops, and ridges, to identify the individual, a cell expression fingerprint containing less than the full complement may be adequate to provide useful and unique identifying and other information about the sample. Moreover, cancer is a multifactorial disease, involving genetic aberrations in more than gene locus. This multifaceted nature may be reflected in different cell expression profiles associated with breast cancers arising in different individuals, in different locations in the same individual, or even within the same cancer locus. As a result, a complete match with a particular cell expression profile, as shown herein, is not necessary to classify a cancer as being of the same type or stage. Similarity to one cell expression profile, e.g., as compared to another, can be adequate to classify cancer types, grades, and stages.

[0100] A mammalian polynucleotide, or fragment thereof, of the present invention is a polynucleotide having a nucleotide sequence obtainable from a natural source. When the species name is used, e.g., human, it indicates that the polynucleotide or polypeptide is obtainable from a natural source. It therefore includes naturally-occurring normal It therefore includes naturally-occurring normal, naturally-occurring mutant, and naturally-occurring polymorphic alleles (e.g., SNPs), differentially-spliced transcripts, splice-variants, etc. By the term “naturally-occurring,” it is meant that the polynucleotide is obtainable from a natural source, e.g., animal tissue and cells, body fluids, tissue culture cells, forensic samples. Natural sources include, e.g., living cells obtained from tissues and whole organisms, tumors, cultured cell lines, including primary and immortalized cell lines. Naturally-occuring mutations can include deletions (e.g., a truncated amino- or carboxy-terminus), substitutions, inversions, or additions of nucleotide sequence. These genes can be detected and isolated by polynucleotide hybridization according to methods which one skilled in the art would know, e.g., as discussed below.

[0101] A polynucleotide according to the present invention can be obtained from a variety of different sources. It can be obtained from DNA or RNA, such as polyadenylated mRNA or total RNA, e.g., isolated from tissues, cells, or whole organism. The polynucleotide can be obtained directly from DNA or RNA, from a cDNA library, from a genomic library, etc. The polynucleotide can be obtained from a cell or tissue (e.g., from an embryonic or adult tissues) at a particular stage of development, having a desired genotype, phenotype, disease status, etc. The polynucleotides described in SEQ ID NOS 1, 3, 5, 7, 9, 11, 13, 15, 17, 19, 21, 23, 25, 27, 29, 31, 33, 35, 37, 39, 41, 43, 45, 47, 49, 51, 53, 55, 57, 59, 61, 63, 65, 67, 69, 71, 73, 75, 77, 79, 81, 83, 85, 87, 89, 91, 115, 117, 118, 120, 123, 125, 127, 129, 131, 133, 135, 137, 139, 141, 143, 145, and/or 147 can be partial sequences that correspond to full-length, naturally-occurring transcripts. The present invention includes, as well, full-length polynucleotides that comprise these partial sequences, e.g., genomic DNAs and polynucleotides comprising a start and stop codon, a start codon and a polyA tail, a transcription start and a polyA tail, etc. These sequences can be obtained by any suitable method, e.g., using a partial sequence as a probe to select a full-length cDNA from a library containing full-length inserts. A polynucleotide which “codes without interruption” refers to a polynucleotide having a continuous open reading frame (“ORF”) as compared to an ORF which is interrupted by introns or other noncoding sequences.

[0102] Polynucleotides and polypeptides (including any part of a differentially regulated breast cancer gene) can be excluded as compositions from the present invention if, e.g., listed in a publicly available databases on the day this application was filed and/or disclosed in a patent application having an earlier filing or priority date than this application and/or conceived and/or reduced to practice earlier than a polynucleotide in this application.

[0103] As described herein, the phrase “an isolated polynucleotide which is SEQ ID NO,” or “an isolated polynucleotide which is selected from SEQ ID NO,” refers to an isolated nucleic acid molecule from which the recited sequence was derived (e.g., a cDNA derived from mRNA; cDNA derived from genomic DNA). Because of sequencing errors, typographical errors, etc., the actual naturally-occurring sequence may differ from a SEQ ID listed herein. Thus, the phrase indicates the specific molecule from which the sequence was derived, rather than a molecule having that exact recited nucleotide sequence, analogously to how a culture depository number refers to a specific cloned fragment in a cryotube. As explained in more detail below, a polynucleotide sequence of the invention can contain the complete sequence as shown in SEQ ID NOS 1, 3, 5, 7, 9, 11, 13, 15, 17, 19, 21, 23, 25, 27, 29, 31, 33, 35, 37, 39, 41, 43, 45, 47, 49, 51, 53, 55, 57, 59, 61, 63, 65, 67, 69, 71, 73, 75, 77, 79, 81, 83, 85, 87, 89, 91, 115, 117, 118, 120, 123, 125, 127, 129, 131, 133, 135, 137, 139, 141, 143, 145, 147, degenerate sequences thereof, anti-sense, muteins thereof, genes comprising said sequences, full-length cDNAs comprising said sequences, complete genomic sequences, fragments thereof, homologs, primers, nucleic acid molecules which hybridize thereto, derivatives thereof, etc.

[0104] Genomic

[0105] The present invention also relates genomic DNA from which the polynucleotides of the present invention can be derived. A genomic DNA coding for a human, mouse, or other mammalian polynucleotide, can be obtained routinely, for example, by screening a genomic library (e.g., a YAC library) with a polynucleotide of the present invention, or by searching nucleotide databases, such as GenBank and EMBL, for matches. Promoter and other regulatory regions (including both 5′ and 3′ regions, as well introns) can be identified upstream or downstream of coding and expressed RNAs, and assayed routinely for activity, e.g., by joining to a reporter gene (e.g., CAT, GFP, alkaline phosphatase, luciferase, galatosidase). A promoter obtained from a breast cancer gene can be used, e.g., in gene therapy to obtain cancer-specific expression of a heterologous gene (e.g., coding for a therapeutic product or cytotoxin). 5′ and 3′ sequences (including, UTRs and introns) can be used to modulate or regulate stability, transcription, and translation of nucleic acids, including the sequence to which is attached in nature, as well as heterologous nucleic acids.

[0106] Constructs

[0107] A polynucleotide of the present invention can comprise additional polynucleotide sequences, e.g., sequences to enhance expression, detection, uptake, cataloging, tagging, etc. A polynucleotide can include only coding sequence; a coding sequence and additional non-naturally occurring or heterologous coding sequence (e.g., sequences coding for leader, signal, secretory, targeting, enzymatic, fluorescent, antibiotic resistance, and other functional or diagnostic peptides); coding sequences and non-coding sequences, e.g., untranslated sequences at either a 5′ or 3′ end, or dispersed in the coding sequence, e.g., introns.

[0108] A polynucleotide according to the present invention also can comprise an expression control sequence operably linked to a polynucleotide as described above. The phrase “expression control sequence” means a polynucleotide sequence that regulates expression of a polypeptide coded for by a polynucleotide to which it is functionally (“operably”) linked. Expression can be regulated at the level of the mRNA or polypeptide. Thus, the expression control sequence includes mRNA-related elements and protein-related elements. Such elements include promoters, enhancers (viral or cellular), ribosome binding sequences, transcriptional terminators, etc. An expression control sequence is operably linked to a nucleotide coding sequence when the expression control sequence is positioned in such a manner to effect or achieve expression of the coding sequence. For example, when a promoter is operably linked 5′ to a coding sequence, expression of the coding sequence is driven by the promoter. Expression control sequences can include an initiation codon and additional nucleotides to place a partial nucleotide sequence of the present invention in-frame in order to produce a polypeptide (e.g., pET vectors from Promega have been designed to permit a molecule to be inserted into all three reading frames to identify the one that results in polypeptide expression). Expression control sequences can be heterologous or endogenous to the normal gene.

[0109] A polynucleotide of the present invention can also comprise nucleic acid vector sequences, e.g., for cloning, expression, amplification, selection, etc. Any effective vector can be used. A vector is, e.g., a polynucleotide molecule which can replicate autonomously in a host cell, e.g., containing an origin of replication. Vectors can be useful to perform manipulations, to propagate, and/or obtain large quantities of the recombinant molecule in a desired host. A skilled worker can select a vector depending on the purpose desired, e.g., to propagate the recombinant molecule in bacteria, yeast, insect, or mammalian cells. The following vectors are provided by way of example. Bacterial: pQE70, pQE60, pQE-9 (Qiagen), pBS, pD10, Phagescript, phiX174, pBK Phagemid, pNH8A, pNH16a, pNH18Z, pNH46A (Stratagene); Bluescript KS+II (Stratagene); ptrc99a, pKK223-3, pKK233-3, pDR540, pRIT5 (Pharmacia). Eukaryotic: PWLNEO, pSV2CAT, pOG44, pXT1, pSG (Stratagene), pSVK3, PBPV, PMSG, pSVL (Pharmacia), pCR2.1/TOPO, pCRII/TOPO, pCR4/TOPO, pTrcHisB, pCMV6-XL4, etc. However, any other vector, e.g., plasmids, viruses, or parts thereof, may be used as long as they are replicable and viable in the desired host. The vector can also comprise sequences which enable it to replicate in the host whose genome is to be modified.

[0110] Hybridization

[0111] Polynucleotide hybridization, as discussed in more detail below, is useful in a variety of applications, including, in gene detection methods, for identifying mutations, for making mutations, to identify homologs in the same and different species, to identify related members of the same gene family, in diagnostic and prognostic assays, in therapeutic applications (e.g., where an antisense polynucleotide is used to inhibit expression), etc. The ability of two single-stranded polynucleotide preparations to hybridize together is a measure of their nucleotide sequence complementarity, e.g., base-pairing between nucleotides, such as A-T, G-C, etc. The invention thus also relates to polynucleotides, and their complements, which hybridize to a polynucleotide comprising a nucleotide sequence as set forth in SEQ ID NOS 1, 3, 5, 7, 9, 11, 13, 15, 17, 19, 21, 23, 25, 27, 29, 31, 33, 35, 37, 39, 41, 43, 45, 47, 49, 51, 53, 55, 57, 59, 61, 63, 65, 67, 69, 71, 73, 75, 77, 79, 81, 83, 85, 87, 89, 91, 115, 117, 118, 120, 123, 125, 127, 129, 131, 133, 135, 137, 139, 141, 143, 145, and/or 147, and genomic sequences thereof. A nucleotide sequence hybridizing to the latter sequence will have a complementary polynucleotide strand, or act as a template for one in the presence of a polymerase (i.e., an appropriate polynucleotide synthesizing enzyme). The present invention includes both strands of polynucleotide, e.g., a sense strand and an anti-sense strand. Hybridization conditions can be chosen to select polynucleotides which have a desired amount of nucleotide complementarity with the nucleotide sequences set forth in SEQ ID NOS 1, 3, 5, 7, 9, 11, 13, 15, 17, 19, 21, 23, 25, 27, 29, 31, 33, 35, 37, 39, 41, 43, 45, 47, 49, 51, 53, 55, 57, 59, 61, 63, 65, 67, 69, 71, 73, 75, 77, 79, 81, 83, 85, 87, 89, 91, 115, 117, 118, 120, 123, 125, 127, 129, 131, 133, 135, 137, 139, 141, 143, 145, 147, and genomic sequences thereof. A polynucleotide capable of hybridizing to such sequence, preferably, possesses, e.g., about 70%, 75%, 80%, 85%, 87%, 90%, 92%, 95%, 97%, 99%, or 100% complementarity, between the sequences. The present invention particularly relates to polynucleotide sequences which hybridize to the nucleotide sequences set forth in SEQ ID NOS 1, 3, 5, 7, 9, 11, 13, 15, 17, 19, 21, 23, 25, 27, 29, 31, 33, 35, 37, 39, 41, 43, 45, 47, 49, 51, 53, 55, 57, 59, 61, 63, 65, 67, 69, 71, 73, 75, 77, 79, 81, 83, 85, 87, 89, 91, 115, 117, 118, 120, 123, 125, 127, 129, 131, 133, 135, 137, 139, 141, 143, 145, 147, or genomic sequences thereof, under low or high stringency conditions. These conditions can be used, e.g., to select corresponding homologs in non-human species.

[0112] Polynucleotides which hybridize to polynucleotides of the present invention can be selected in various ways. Filter-type blots (i.e., matrices containing polynucleotide, such as nitrocellulose), glass chips, and other matrices and substrates comprising polynucleotides (short or long) of interest, can be incubated in a prehybridization solution (e.g., 6×SSC, 0.5% SDS, 100 μg/ml denatured salmon sperm DNA, 5× Denhardt's solution, and 50% formamide), at 22-68° C., overnight, and then hybridized with a detectable polynucleotide probe under conditions appropriate to achieve the desired stringency. In general, when high homology or sequence identity is desired, a high temperature can be used (e.g., 65° C.). As the homology drops, lower washing temperatures are used. For salt concentrations, the lower the salt concentration, the higher the stringency. The length of the probe is another consideration. Very short probes (e.g., less than 100 base pairs) are washed at lower temperatures, even if the homology is high. With short probes, formamide can be omitted. See, e.g., Current Protocols in Molecular Biology, Chapter 6, Screening of Recombinant Libraries; Sambrook et al., Molecular Cloning, 1989, Chapter 9.

[0113] For instance, high stringency conditions can be achieved by incubating the blot overnight (e.g., at least 12 hours) with a long polynucleotide probe in a hybridization solution containing, e.g., about 5×SSC, 0.5% SDS, 100 μg/ml denatured salmon sperm DNA and 50% formamide, at 42° C. Blots can be washed at high stringency conditions that allow, e.g., for less than 5% bp mismatch (e.g., wash twice in 0.1% SSC and 0.1% SDS for 30 min at 65° C.), i.e., selecting sequences having 95% or greater sequence identity.

[0114] Other non-limiting examples of high stringency conditions includes a final wash at 65° C. in aqueous buffer containing 30 mM NaCl and 0.5% SDS. Another example of high stringent conditions is hybridization in 7% SDS, 0.5 M NaPO₄, pH 7, 1 mM EDTA at 50° C., e.g., overnight, followed by one or more washes with a 1% SDS solution at 42° C. Whereas high stringency washes can allow for less than 10%, less than 5% mismatch, etc., reduced or low stringency conditions can permit up to 20% nucleotide mismatch. Hybridization at low stringency can be accomplished as above, but using lower formamide conditions, lower temperatures and/or lower salt concentrations, as well as longer periods of incubation time.

[0115] Hybridization can also be based on a calculation of melting temperature (Tm) of the hybrid formed between the probe and its target, as described in Sambrook et al. Generally, the temperature Tm at which a short oligonucleotide (containing 18 nucleotides or fewer) will melt from its target sequence is given by the following equation: Tm=(number of A's and T's)×2° C.+(number of C's and G's)×4° C. For longer molecules, Tₘ=81.5+16.6 log₁₀[Na⁺]+0.41(% GC)-600/N where [Na⁺] is the molar concentration of sodium ions, % GC is the percentage of GC base pairs in the probe, and N is the length. Hybridization can be carried out at several degrees below this temperature to ensure that the probe and target can hybridize. Mismatches can be allowed for by lowering the temperature even further.

[0116] Stringent conditions can be selected to isolate sequences, and their complements, which have, e.g., at least about 90%, 95%, or 97%, nucleotide complementarity between the probe (e.g., a short polynucleotide of SEQ ID NOS 1, 3, 5, 7, 9, 11, 13, 15, 17, 19, 21, 23, 25, 27, 29, 31, 33, 35, 37, 39, 41, 43, 45, 47, 49, 51, 53, 55, 57, 59, 61, 63, 65, 67, 69, 71, 73, 75, 77, 79, 81, 83, 85, 87, 89, 91, 115, 117, 118, 120, 123, 125, 127, 129, 131, 133, 135, 137, 139, 141, 143, 145, 147, or genomic sequences thereof) and a target polynucleotide.

[0117] Other homologs of polynucleotides of the present invention can be obtained from mammalian and non-mammalian sources according to various methods. For example, hybridization with a polynucleotide can be employed to select homologs, e.g., as described in Sambrook et al., Molecular Cloning, Chapter 11, 1989. Such homologs can have varying amounts of nucleotide and amino acid sequence identity and similarity to such polynucleotides of the present invention. Mammalian organisms include, e.g., mice, rats, monkeys, pigs, cows, etc. Non-mammalian organisms include, e.g., vertebrates, invertebrates, zebra fish, chicken, Drosophila, C. elegans, Xenopus, yeast such as S. pombe, S. cerevisiae, roundworms, prokaryotes, plants, Arabidopsis, artemia, viruses, etc. The degree of nucleotide sequence identity between human and mouse can be about, e.g. 70% or more, 85% or more for open reading frames, etc.

[0118] Alignment

[0119] Alignments can be accomplished by using any effective algorithm. For pairwise alignments of DNA sequences, the methods described by Wilbur-Lipman (e.g., Wilbur and Lipman, Proc. Natl. Acad. Sci., 80:726-730, 1983) or Martinez/Needleman-Wunsch (e.g., Martinez, Nucleic Acid Res., 11:4629-4634, 1983) can be used. For instance, if the Martinez/Needleman-Wunsch DNA alignment is applied, the minimum match can be set at 9, gap penalty at 1.10, and gap length penalty at 0.33. The results can be calculated as a similarity index, equal to the sum of the matching residues divided by the sum of all residues and gap characters, and then multiplied by 100 to express as a percent. Similarity index for related genes at the nucleotide level in accordance with the present invention can be greater than 70%, 80%, 85%, 90%, 95%, 99%, or more. Pairs of protein sequences can be aligned by the Lipman-Pearson method (e.g., Lipman and Pearson, Science, 227:1435-1441, 1985) with k-tuple set at 2, gap penalty set at 4, and gap length penalty set at 12. Results can be expressed as percent similarity index, where related genes at the amino acid level in accordance with the present invention can be greater than 65%, 70%, 75%, 80%, 85%, 90%, 95%, 99%, or more. Various commercial and free sources of alignment programs are available, e.g., MegAlign by DNA Star, BLAST (National Center for Biotechnology Information), BCM (Baylor College of Medicine) Launcher, etc. BLAST can be used to calculate amino acid sequence identity, amino acid sequence homology, and nucleotide sequence identity. These calculations can be made along the entire length of each of the target sequences which are to be compared.

[0120] After two sequences have been aligned, a “percent sequence identity” can be determined. For these purposes, it is convenient to refer to a Reference Sequence and a Compared Sequence, where the Compared Sequence is compared to the Reference Sequence. Percent sequence identity can be determined according to the following formula: Percent Identity =100 [1−(C/R)], wherein C is the number of differences between the Reference Sequence and the Compared Sequence over the length of alignment between the Reference Sequence and the Compared Sequence where (i) each base or amino acid in the Reference Sequence that does not have a corresponding aligned base or amino acid in the Compared Sequence, (ii) each gap in the Reference Sequence, (iii) each aligned base or amino acid in the Reference Sequence that is different from an aligned base or amino acid in the Compared Sequence, constitutes a difference; and R is the number of bases or amino acids in the Reference Sequence over the length of the alignment with the Compared Sequence with any gap created in the Reference Sequence also being counted as a base or amino acid.

[0121] Percent sequence identity can also be determined by other conventional methods, e.g., as described in Altschul et al., Bull. Math. Bio. 48: 603-616, 1986 and Henikoff and Henikoff, Proc. Natl. Acad. Sci. USA 89:10915-10919, 1992.

[0122] Specific Polynucleotide Probes

[0123] A polynucleotide of the present invention can comprise any continuous nucleotide sequence of SEQ ID NOS 1, 3, 5, 7, 9, 11, 13, 15, 17, 19, 21, 23, 25, 27, 29, 31, 33, 35, 37, 39, 41, 43, 45, 47, 49, 51, 53, 55, 57, 59, 61, 63, 65, 67, 69, 71, 73, 75, 77, 79, 81, 83, 85, 87, 89, 91, 115, 117, 118, 120, 123, 125, 127, 129, 131, 133, 135, 137, 139, 141, 143, 145, and/or 147, sequences which share sequence identity thereto, or complements thereof. The term “probe” refers to any substance that can be used to detect, identify, isolate, etc., another substance. A polynucleotide probe is comprised of nucleic acid can be used to detect, identify, etc., other nucleic acids, such as DNA and RNA.

[0124] These polynucleotides can be of any desired size that is effective to achieve the specificity desired. For example, a probe can be from about 7 or 8 nucleotides to several thousand nucleotides, depending upon its use and purpose. For instance, a probe used as a primer PCR can be shorter than a probe used in an ordered array of polynucleotide probes. Probe sizes vary, and the invention is not limited in any way by their size, e.g., probes can be from about 7-2000 nucleotides, 7-1000, 8-700, 8-600, 8-500, 8-400, 8-300, 8-150, 8-100, 8-75, 7-50, 10-25, 14-16, at least about 8, at least about 10, at least about 15, at least about 25, etc. The polynucleotides can have non-naturally-occurring nucleotides, e.g., inosine, AZT, 3TC, etc. The polynucleotides can have 100% sequence identity or complementarity to a sequence of SEQ ID NOS 1, 3, 5, 7, 9, 11, 13, 15, 17, 19, 21, 23, 25, 27, 29, 31, 33, 35, 37, 39, 41, 43, 45, 47, 49, 51, 53, 55, 57, 59, 61, 63, 65, 67, 69, 71, 73, 75, 77, 79, 81, 83, 85, 87, 89, 91, 115, 117, 118, 120, 123, 125, 127, 129, 131, 133, 135, 137, 139, 141, 143, 145, 147, or it can have mismatches or nucleotide substitutions, e.g., 1, 2, 3, 4, or 5 substitutions. The probes can be single-stranded or double-stranded.

[0125] In accordance with the present invention, a polynucleotide can be present in a kit, where the kit includes, e.g., one or more polynucleotides, a desired buffer (e.g., phosphate, tris, etc.), detection compositions, RNA or cDNA from different tissues to be used as controls, libraries, etc. The polynucleotide can be labeled or unlabeled, with radioactive or non-radioactive labels as known in the art. Kits can comprise one or more pairs of polynucleotides for amplifying nucleic acids specific for differentially-regulated genes of the present invention, e.g., comprising a forward and reverse primer effective in PCR. These include both sense and anti-sense orientations. For instance, in PCR-based methods (such as RT-PCR), a pair of primers are typically used, one having a sense sequence and the other having an antisense sequence.

[0126] Another aspect of the present invention is a nucleotide sequence that is specific to, or for, a selective polynucleotide. The phrases “specific for” or “specific to” a polynucleotide have a functional meaning that the polynucleotide can be used to identify the presence of one or more target genes in a sample and distinguish them from non-target genes. It is specific in the sense that it can be used to detect polynucleotides above background noise (“non-specific binding”). A specific sequence is a defined order of nucleotides (or amino acid sequences, if it is a polypeptide sequence) which occurs in the polynucleotide, e.g., in the nucleotide sequences of SEQ ID NOS 1, 3, 5, 7, 9, 11, 13, 15, 17, 19, 21, 23, 25, 27, 29, 31, 33, 35, 37, 39, 41, 43, 45, 47, 49, 51, 53, 55, 57, 59, 61, 63, 65, 67, 69, 71, 73, 75, 77, 79, 81, 83, 85, 87, 89, 91, 115, 117, 118, 120, 123, 125, 127, 129, 131, 133, 135, 137, 139, 141, 143, 145, 147, and which is characteristic of that target sequence, and substantially no non-target sequences. A probe or mixture of probes can comprise a sequence or sequences that are specific to a plurality of target sequences, e.g., where the sequence is a consensus sequence, a functional domain, etc., e.g., capable of recognizing a family of related genes. Such sequences can be used as probes in any of the methods described herein or incorporated by reference. Both sense and antisense nucleotide sequences are included. A specific polynucleotide according to the present invention can be determined routinely.

[0127] A polynucleotide comprising a specific sequence can be used as a hybridization probe to identify the presence of, e.g., human or mouse polynucleotide, in a sample comprising a mixture of polynucleotides, e.g., on a Northern blot. Hybridization can be performed under high stringent conditions (see, above) to select polynucleotides (and their complements which can contain the coding sequence) having at least 90%, 95%, 99%, etc., identity (i.e., complementarity) to the probe, but less stringent conditions can also be used. A specific polynucleotide sequence can also be fused in-frame, at either its 5′ or 3′ end, to various nucleotide sequences as mentioned throughout the patent, including coding sequences for enzymes, detectable markers, GFP, etc, expression control sequences, etc.

[0128] A polynucleotide probe, especially one that is specific to a polynucleotide of the present invention, can be used in gene detection and hybridization methods as already described. In one embodiment, a specific polynucleotide probe can be used to detect whether a particular tissue or cell-type is present in a target sample. To carry out such a method, a selective polynucleotide can be chosen which is characteristic of the desired target tissue. Such polynucleotide is preferably chosen so that it is expressed or displayed in the target tissue, but not in other tissues which are present in the sample. For instance, if detection of breast cancer is desired, it may not matter whether the selective polynucleotide is expressed in other tissues, as long as it is not expressed in cells normally present in blood, e.g., peripheral blood mononuclear cells. Starting from the selective polynucleotide, a specific polynucleotide probe can be designed which hybridizes (if hybridization is the basis of the assay) under the hybridization conditions to the selective polynucleotide, whereby the presence of the selective polynucleotide can be determined.

[0129] Probes which are specific for polynucleotides of the present invention can also be prepared using involve transcription-based systems, e.g., incorporating an RNA polymerase promoter into a selective polynucleotide of the present invention, and then transcribing anti-sense RNA using the polynucleotide as a template. See, e.g., U.S. Pat. No. 5,545,522.

[0130] Polynucleotide Composition

[0131] A polynucleotide according to the present invention can comprise, e.g., DNA, RNA, synthetic polynucleotide, peptide polynucleotide, modified nucleotides, dsDNA, ssDNA, ssRNA, dsRNA, and mixtures thereof. A polynucleotide can be single- or double-stranded, triplex, DNA:RNA, duplexes, comprise hairpins, and other secondary structures, etc. Nucleotides comprising a polynucleotide can be joined via various known linkages, e.g., ester, sulfamate, sulfamide, phosphorothioate, phosphoramidate, methylphosphonate, carbamate, etc., depending on the desired purpose, e.g., resistance to nucleases, such as RNAse H, improved in vivo stability, etc. See, e.g., U.S. Pat. No. 5,378,825. Any desired nucleotide or nucleotide analog can be incorporated, e.g., 6-mercaptoguanine, 8-oxo-guanine, etc.

[0132] Various modifications can be made to the polynucleotides, such as attaching detectable markers (avidin, biotin, radioactive elements, fluorescent tags and dyes, energy transfer labels, energy-emitting labels, binding partners, etc.) or moieties which improve hybridization, detection, and/or stability. The polynucleotides can also be attached to solid supports, e.g., nitrocellulose, magnetic or paramagnetic microspheres (e.g., as described in U.S. Pat. No. 5,411,863; U.S. Pat. No. 5,543,289; for instance, comprising ferromagnetic, supermagnetic, paramagnetic, superparamagnetic, iron oxide and polysaccharide), nylon, agarose, diazotized cellulose, latex solid microspheres, polyacrylamides, etc., according to a desired method. See, e.g., U.S. Pat. Nos. 5,470,967, 5,476,925, and 5,478,893.

[0133] Polynucleotide according to the present invention can be labeled according to any desired method. The polynucleotide can be labeled using radioactive tracers such as ³²P, ³⁵S, ³H, or ¹⁴C, to mention some commonly used tracers. The radioactive labeling can be carried out according to any method, such as, for example, terminal labeling at the 3′ or 5′ end using a radiolabeled nucleotide, polynucleotide kinase (with or without dephosphorylation with a phosphatase) or a ligase (depending on the end to be labeled). A non-radioactive labeling can also be used, combining a polynucleotide of the present invention with residues having immunological properties (antigens, haptens), a specific affinity for certain reagents (ligands), properties enabling detectable enzyme reactions to be completed (enzymes or coenzymes, enzyme substrates, or other substances involved in an enzymatic reaction), or characteristic physical properties, such as fluorescence or the emission or absorption of light at a desired wavelength, etc.

[0134] Nucleic Acid Detection Methods

[0135] Another aspect of the present invention relates to methods and processes for detecting differentially-regulated genes of the present invention. Detection methods have a variety of applications, including for diagnostic, prognostic, forensic, and research applications. To accomplish gene detection, a polynucleotide in accordance with the present invention can be used as a “probe.” The term “probe” or “polynucleotide probe” has its customary meaning in the art, e.g., a polynucleotide which is effective to identify (e.g., by hybridization), when used in an appropriate process, the presence of a target polynucleotide to which it is designed. Identification can involve simply determining presence or absence, or it can be quantitative, e.g., in assessing amounts of a gene or gene transcript present in a sample. Probes can be useful in a variety of ways, such as for diagnostic purposes, to identify homologs, and to detect, quantitate, or isolate a polynucleotide of the present invention in a test sample.

[0136] Assays can be utilized which permit quantification and/or presence/absence detection of a target nucleic acid in a sample. Assays can be performed at the single-cell level, or in a sample comprising many cells, where the assay is “averaging” expression over the entire collection of cells and tissue present in the sample. Any suitable assay format can be used, including, but not limited to, e.g., Southern blot analysis, Northern blot analysis, polymerase chain reaction (“PCR”) (e.g., Saiki et al., Science, 241:53, 1988; U.S. Pat. Nos. 4,683,195, 4,683,202, and 6,040,166; PCR Protocols: A Guide to Methods and Applications, Innis et al., eds., Academic Press, New York, 1990), reverse tmmscriptase polymerase chain reaction (“RT-PCR”), anchored PCR, rapid amplification of cDNA ends (“RACE”) (e.g., Schaefer in Gene Cloning and Analysis: Current Innovations, Pages 99-115, 1997), ligase chain reaction (“LCR”) (EP 320 308), one-sided PCR (Ohara et al., Proc. Natl. Acad. Sci., 86:5673-5677, 1989), indexing methods (e.g., U.S. Pat. No. 5,508,169), in situ hybridization, differential display (e.g., Liang et al., Nucl. Acid. Res., 21:3269-3275, 1993; U.S. Pat. Nos. 5,262,311, 5,599,672 and 5,965,409; WO97/18454; Prashar and Weissman, Proc. Natl. Acad. Sci., 93:659-663, and U.S. Pat. Nos. 6,010,850 and 5,712,126; Welsh et al., Nucleic Acid Res., 20:49654970, 1992, and U.S. Pat. No. 5,487,985) and other RNA fingerprinting techniques, nucleic acid sequence based amplification (“NASBA”) and other transcription based amplification systems (e.g., U.S. Pat. Nos. 5,409,818 and 5,554,527; WO 88/10315), polynucleotide arrays (e.g., U.S. Pat. Nos. 5,143,854, 5,424,186; 5,700,637, 5,874,219, and 6,054,270; PCT WO 92/10092; PCT WO 90/15070), Qbeta Replicase (PCT/US87/00880), Strand Displacement Amplification (“SDA”), Repair Chain Reaction (“RCR”), nuclease protection assays, subtraction-based methods, Rapid-Scan™, etc. Additional useful methods include, but are not limited to, e.g., template-based amplification methods, competitive PCR (e.g., U.S. Pat. No. 5,747,251), redox-based assays (e.g., U.S. Pat. No. 5,871,918), Taqman-based assays (e.g., Holland et al., Proc. Natl. Acad, Sci., 88:7276-7280, 1991; U.S. Pat. Nos. 5,210,015 and 5,994,063), real-time fluorescence-based monitoring (e.g., U.S. Pat. No. 5,928,907), molecular energy transfer labels (e.g., U.S. Pat. Nos. 5,348,853, 5,532,129, 5,565,322, 6,030,787, and 6,117,635; Tyagi and Kramer, Nature Biotech., 14:303-309, 1996). Any method suitable for single cell analysis of gene or protein expression can be used, including in situ hybridization, immunocytochemistry, MACS, FACS, flow cytometry, etc. For single cell assays, expression products can be measured using antibodies, PCR, or other types of nucleic acid amplification (e.g., Brady et al., Methods Mol. & Cell. Biol. 2, 17-25, 1990; Eberwine et al., 1992, Proc. Natl. Acad. Sci., 89, 3010-3014, 1992; U.S. Pat. No. 5,723,290). These and other methods can be carried out conventionally, e.g., as described in the mentioned publications.

[0137] Many of such methods may require that the polynucleotide is labeled, or comprises a particular nucleotide type useful for detection. The present invention includes such modified polynucleotides that are necessary to carry out such methods. Thus, polynucleotides can be DNA, RNA, DNA:RNA hybrids, PNA, etc., and can comprise any modification or substituent which is effective to achieve detection.

[0138] Detection can be desirable for a variety of different purposes, including research, diagnostic, prognostic, and forensic. For diagnostic purposes, it may be desirable to identify the presence or quantity of a polynucleotide sequence in a sample, where the sample is obtained from tissue, cells, body fluids, etc. In a preferred method as described in more detail below, the present invention relates to a method of detecting a polynucleotide comprising, contacting a target polynucleotide in a test sample with a polynucleotide probe under conditions effective to achieve hybridization between the target and probe; and detecting hybridization.

[0139] Any test sample in which it is desired to identify a polynucleotide or polypeptide thereof can be used, including, e.g., blood, urine, saliva, stool (for extracting nucleic acid, see, e.g., U.S. Pat. No. 6,177,251), swabs comprising tissue, biopsied tissue, tissue sections, cultured cells, etc.

[0140] Detection can be accomplished in combination with polynucleotide probes for other genes, e.g., genes which are expressed in other disease states, tissues, cells, such as brain, heart, kidney, spleen, thymus, liver, stomach, small intestine, colon, muscle, lung, testis, placenta, pituitary, thyroid, skin, adrenal gland, pancreas, salivary gland, uterus, ovary, prostate gland, peripheral blood cells (T-cells, lymphocytes, etc.), embryo, normal breast fat, adult and embryonic stem cells, specific cell-types, such as endothelial, epithelial, myocytes, adipose, luminal epithelial, basoepithelial, myoepithelial, stromal cells, etc.

[0141] Polynucleotides can be used in wide range of methods and compositions, including for detecting, diagnosing, staging, grading, assessing, prognosticating, etc. diseases and disorders associated with differentially-regulated genes of the present invention, for monitoring or assessing therapeutic and/or preventative measures, in ordered arrays, etc. Any method of detecting genes and polynucleotides of SEQ ID NOS 1, 3, 5, 7, 9, 11, 13, 15, 17, 19, 21, 23, 25, 27, 29, 31, 33, 35, 37, 39, 41, 43, 45, 47, 49, 51, 53, 55, 57, 59, 61, 63, 65, 67, 69, 71, 73, 75, 77, 79, 81, 83, 85, 87, 89, 91, 115, 117, 118, 120, 123, 125, 127, 129, 131, 133, 135, 137, 139, 141, 143, 145, and/or 147 can be used; certainly, the present invention is not to be limited how such methods are implemented.

[0142] Along these lines, the present invention relates to methods of detecting differentially-regulated genes described herein in a sample comprising nucleic acid. Such methods can comprise one or more the following steps in any effective order, e.g., contacting said sample with a polynucleotide probe under conditions effective for said probe to hybridize specifically to nucleic acid in said sample, and detecting the presence or absence of probe hybridized to nucleic acid in said sample, wherein said probe is a polynucleotide which is selected from SEQ ID NOS 1, 3, 5, 7, 9, 11, 13, 15, 17, 19, 21, 23, 25, 27, 29, 31, 33, 35, 37, 39, 41, 43, 45, 47, 49, 51, 53, 55, 57, 59, 61, 63, 65, 67, 69, 71, 73, 75, 77, 79, 81, 83, 85, 87, 89, 91, 115, 117, 118, 120, 123, 125, 127, 129, 131, 133, 135, 137, 139, 141, 143, 145, 147,a polynucleotide having, e.g., about 70%, 80%, 85%, 90%, 95%, 99%, or more sequence identity thereto, effective or specific fragments thereof, or complements thereto. The detection method can be applied to any sample, e.g., cultured primary, secondary, or established cell lines, tissue biopsy, blood, urine, stool, cerebral spinal fluid, and other bodily fluids, for any purpose.

[0143] Contacting the sample with probe can be carried out by any effective means in any effective environment. It can be accomplished in a solid, liquid, frozen, gaseous, amorphous, solidified, coagulated, colloid, etc., mixtures thereof, matrix. For instance, a probe in an aqueous medium can be contacted with a sample which is also in an aqueous medium, or which is affixed to a solid matrix, or vice-versa.

[0144] Generally, as used throughout the specification, the term “effective conditions” means, e.g., the particular milieu in which the desired effect is achieved. Such a milieu, includes, e.g., appropriate buffers, oxidizing agents, reducing agents, pH, co-factors, temperature, ion concentrations, suitable age and/or stage of cell (such as, in particular part of the cell cycle, or at a particular stage where particular genes are being expressed) where cells are being used, culture conditions (including substrate, oxygen, carbon dioxide, etc.). When hybridization is the chosen means of achieving detection, the probe and sample can be combined such that the resulting conditions are functional for said probe to hybridize specifically to nucleic acid in said sample.

[0145] The phrase “hybridize specifically” indicates that the hybridization between single-stranded polynucleotides is based on nucleotide sequence complementarity. The effective conditions are selected such that the probe hybridizes to a preselected and/or definite target nucleic acid in the sample. For instance, if detection of a polynucleotide set forth in SEQ ID NOS 1, 3, 5, 7, 9, 11, 13, 15, 17, 19, 21, 23, 25, 27, 29, 31, 33, 35, 37, 39, 41, 43, 45, 47, 49, 51, 53, 55, 57, 59, 61, 63, 65, 67, 69, 71, 73, 75, 77, 79, 81, 83, 85, 87, 89, 91, 115, 117, 118, 120, 123, 125, 127, 129, 131, 133, 135, 137, 139, 141, 143, 145, and/or 147 is desired, a probe can be selected which can hybridize to such target gene under high stringent conditions, without significant hybridization to other genes in the sample. To detect homologs of a polynucleotide set forth in SEQ ID NOS 1, 3, 5, 7, 9, 11, 13, 15, 17, 19, 21, 23, 25, 27, 29, 31, 33, 35, 37, 39, 41, 43, 45, 47, 49, 51, 53, 55, 57, 59, 61, 63, 65, 67, 69, 71, 73, 75, 77, 79, 81, 83, 85, 87, 89, 91, 115, 117, 118, 120, 123, 125, 127, 129, 131, 133, 135, 137, 139, 141, 143, 145, and/or 147, the effective hybridization conditions can be less stringent, and/or the probe can comprise codon degeneracy, such that a homolog is detected in the sample.

[0146] As already mentioned, the methods can be carried out by any effective process, e.g., by Northern blot analysis, polymerase chain reaction (PCR), reverse transcriptase PCR, RACE PCR, in situ hybridization, etc., as indicated above. When PCR based techniques are used, two or more probes are generally used. One probe can be specific for a defined sequence which is characteristic of a selective polynucleotide, but the other probe can be specific for the selective polynucleotide, or specific for a more general sequence, e.g., a sequence such as polyA which is characteristic of mRNA, a sequence which is specific for a promoter, ribosome binding site, or other transcriptional features, a consensus sequence (e.g., representing a functional domain). For the former aspects, 5′ and 3′ probes (e.g., polyA, Kozak, etc.) are preferred which are capable of specifically hybridizing to the ends of transcripts. When PCR is utilized, the probes can also be referred to as “primers” in that they can prime a DNA polymerase reaction.

[0147] In addition to testing for the presence or absence of polynucleotides, the present invention also relates to determining the amounts at which polynucleotides of the present invention are expressed in sample and determining the differential expression of such polynucleotides in samples. Such methods can involve substantially the same steps as described above for presence/absence detection, e.g., contacting with probe, hybridizing, and detecting hybridized probe, but using more quantitative methods and/or comparisons to standards.

[0148] The amount of hybridization between the probe and target can be determined by any suitable methods, e.g., PCR, RT-PCR, RACE PCR, Northern blot, polynucleotide microarrays, Rapid-Scan, etc., and includes both quantitative and qualitative measurements. For further details, see the hybridization methods described above and below. Determining by such hybridization whether the target is differentially expressed (e.g., up-regulated or down-regulated) in the sample can also be accomplished by any effective means. For instance, the target's expression pattern in the sample can be compared to its pattern in a known standard, such as in a normal tissue, or it can be compared to another gene in the same sample. When a second sample is utilized for the comparison, it can be a sample of normal tissue that is known not to contain diseased cells. The comparison can be performed on samples which contain the same amount of RNA (such as polyadenylated RNA or total RNA), or, on RNA extracted from the same amounts of starting tissue. Such a second sample can also be referred to as a control or standard. Hybridization can also be compared to a second target in the same tissue sample. Experiments can be performed that determine a ratio between the target nucleic acid and a second nucleic acid (a standard or control), e.g., in a normal tissue. When the ratio between the target and control are substantially the same in a normal and sample, the sample is determined or diagnosed not to contain cells. However, if the ratio is different between the normal and sample tissues, the sample is determined to contain cancer cells. The approaches can be combined, and one or more second samples, or second targets can be used. Any second target nucleic acid can be used as a comparison, including “housekeeping” genes, such as beta-actin, alcohol dehydrogenase, or any other gene whose expression does not vary depending upon the disease status of the cell.

[0149] Methods of Identifying Polymorphisms, Mutations, Etc., of a Differentially-Regulated Gene

[0150] Polynucleotides of the present invention can also be utilized to identify mutant alleles, SNPs, gene rearrangements and modifications, and other polymorphisms of the wild-type gene. Mutant alleles, polymorphisms, SNPs, etc., can be identified and isolated from cancers that are known, or suspected to have, a genetic component. Identification of such genes can be carried out routinely (see, above for more guidance), e.g., using PCR, hybridization techniques, direct sequencing, mismatch reactions (see, e.g., above), RFLP analysis, SSCP (e.g., Orita et al., Proc. Natl. Acad. Sci., 86:2766, 1992), etc., where a polynucleotide having a sequence selected from SEQ ID NOS 1, 3, 5, 7, 9, 11, 13, 15, 17, 19, 21, 23, 25, 27, 29, 31, 33, 35, 37, 39, 41, 43, 45, 47, 49, 51, 53, 55, 57, 59, 61, 63, 65, 67, 69, 71, 73, 75, 77, 79, 81, 83, 85, 87, 89, 91, 115, 117, 118, 120, 123, 125, 127, 129, 131, 133, 135, 137, 139, 141, 143, 145, and/or 147 is used as a probe. The selected mutant alleles, SNPs, polymorphisms, etc., can be used diagnostically to determine whether a subject has, or is susceptible to a disorder associated with a differentially-regulated gene, as well as to design therapies and predict the outcome of the disorder. Methods involve, e.g., diagnosing a disorder associated with a differentially-regulated gene or determining susceptibility to a disorder, comprising, detecting the presence of a mutation in a gene represented by a polynucleotide selected from SEQ D NOS 1, 3, 5, 7, 9, 11, 13, 15, 17, 19, 21, 23, 25, 27, 29, 31, 33, 35, 37, 39, 41, 43, 45, 47, 49, 51, 53, 55, 57, 59, 61, 63, 65, 67, 69, 71, 73, 75, 77, 79, 81, 83, 85, 87, 89, 91, 115, 117, 118, 120, 123, 125, 127, 129, 131, 133, 135, 137, 139, 141, 143, 145, and/or 147. The detecting can be carried out by any effective method, e.g., obtaining cells from a subject, determining the gene sequence or structure of a target gene (using, e.g., mRNA, cDNA, genomic DNA, etc), comparing the sequence or structure of the target gene to the structure of the normal gene, whereby a difference in sequence or structure indicates a mutation in the gene in the subject. Polynucleotides can also be used to test for mutations, SNPs, polymorphisms, etc., e.g., using mismatch DNA repair technology as described in U.S. Pat. No. 5,683,877; U.S. Pat. No. 5,656,430; Wu et al., Proc. Natl. Acad. Sci., 89:8779-8783, 1992.

[0151] The present invention also relates to methods of detecting polymorphisms in a differentially-regulated gene, comprising, e.g., comparing the structure of: genomic DNA comprising all or part of said gene, mRNA comprising all or part of said gene, cDNA comprising all or part of said gene, or a polypeptide comprising all or part of said gene, with the structure of said gene as set forth herein. The methods can be carried out on a sample from any source, e.g., cells, tissues, body fluids, blood, urine, stool, hair, egg, sperm, etc.

[0152] These methods can be implemented in many different ways. For example, “comparing the structure” steps include, but are not limited to, comparing restriction maps, nucleotide sequences, amino acid sequences, RFLPs, DNAse sites, DNA methylation fingerprints (e.g., U.S. Pat. No. 6,214,556), protein cleavage sites, molecular weights, electrophoretic mobilities, charges, ion mobility, etc., between a standard gene and a test gene. The term “structure” can refer to any physical characteristics or configurations which can be used to distinguish between nucleic acids and polypeptides. The methods and instruments used to accomplish the comparing step depends upon the physical characteristics which are to be compared. Thus, various techniques are contemplated, including, e.g., sequencing machines (both amino acid and polynucleotide), electrophoresis, mass spectrometer (U.S. Pat. Nos. 6,093,541, 6,002,127), liquid chromatography, HPLC, etc.

[0153] To carry out such methods, “all or part” of the gene or polypeptide can be compared. For example, if nucleotide sequencing is utilized, the entire gene can be sequenced, including promoter, introns, and exons, or only parts of it can be sequenced and compared, e.g., exon 1, exon 2, etc.

[0154] Mutagenesis

[0155] Mutated polynucleotide sequences of the present invention are useful for various purposes, e.g., to create mutations of the polypeptides they encode, to identify functional regions of genomic DNA, to produce probes for screening libraries, etc. Mutagenesis can be carried out routinely according to any effective method, e.g., oligonucleotide-directed (Smith, M., Ann. Rev. Genet. 19:423-463, 1985), degenerate oligonucleotide-directed (Hill et al., Method Enzymology, 155:558-568, 1987), region-specific (Myers et al., Science, 229:242-246, 1985; Derbyshire et al., Gene, 46:145, 1986; Ner et al., DNA, 7:127, 1988), linker-scanning (McKnight and Kingsbury, Science, 217:316-324, 1982), directed using PCR, recursive ensemble mutagenesis (Arkin and Yourvan, Proc. Natl. Acad. Sci., 89:7811-7815, 1992), random mutagenesis (e.g., U.S. Pat. Nos. 5,096,815; 5,198,346; and 5,223,409), site-directed mutagenesis (e.g., Walder et al., Gene, 42:133, 1986; Bauer et al., Gene, 37:73, 1985; Craik, Bio Techniques, January 1985, 12-19; Smith et al., Genetic Engineering: Principles and Methods, Plenum Press, 1981), phage display (e.g., Lowman et al., Biochem. 30:10832-10837, 1991; Ladner et al., U.S. Pat. No. 5,223,409; Huse, WIPO Publication WO 92/06204), etc. Desired sequences can also be produced by the assembly of target sequences using mutually priming oligonucleotides (Uhlmann, Gene, 71:2940, 1988). For directed mutagenesis methods, analysis of the three-dimensional structure of the polypeptide can be used to guide and facilitate making mutants which effect polypeptide activity. Sites of substrate-enzyme interaction or other biological activities can also be determined by analysis of crystal structure as determined by such techniques as nuclear magnetic resonance, crystallography or photoaffinity labeling. See, for example, de Vos et al., Science 255:306-312, 1992; Smith et al., J. Mol. Biol. 224:899-904, 1992; Wlodaver et al., FEBS Lett. 309:59-64, 1992.

[0156] In addition, libraries of differentially-regulated genes and fragments thereof can be used for screening and selection of gene variants. For instance, a library of coding sequences can be generated by treating a double-stranded DNA with a nuclease under conditions where the nicking occurs, e.g., only once per molecule, denaturing the double-stranded DNA, renaturing it to for double-stranded DNA that can include sense/antisense pairs from different nicked products, removing single-stranded portions from reformed duplexes by treatment with S1 nuclease, and ligating the resulting DNAs into an expression vector. By this method, expression libraries can be made comprising “mutagenized” differentially-regulated genes. The entire coding sequence or parts thereof can be used.

[0157] Polynucleotide Expression, Polypeptides Produced Thereby, and Specific-Binding Partners Thereto

[0158] A polynucleotide according to the present invention can be expressed in a variety of different systems, in vitro and in vivo, according to the desired purpose. For example, a polynucleotide can be inserted into an expression vector, introduced into a desired host, and cultured under conditions effective to achieve expression of a polypeptide coded for by the polynucleotide, to search for specific binding partners. Effective conditions include any culture conditions which are suitable for achieving production of the polypeptide by the host cell, including effective temperatures, pH, medium, additives to the media in which the host cell is cultured (e.g., additives which amplify or induce expression such as butyrate, or methotrexate if the coding polynucleotide is adjacent to a dhfr gene), cycloheximide, cell densities, culture dishes, etc. A polynucleotide can be introduced into the cell by any effective method including, e.g., naked DNA, calcium phosphate precipitation, electroporation, injection, DEAE-Dextran mediated transfection, fusion with liposomes, association with agents which enhance its uptake into cells, viral transfection. A cell into which a polynucleotide of the present invention has been introduced is a transformed host cell. The polynucleotide can be extrachromosomal or integrated into a chromosome(s) of the host cell. It can be stable or transient. An expression vector is selected for its compatibility with the host cell. Host cells include, mammalian cells, e.g., COS, CV1, BHK, CHO, HeLa, LTK, NIH 3T3, ZR-75-1 (ATCC CRL-1500), ZR-75-30 (ATCC CRL-1504), UACC-812 (ATCC CRL-1897), UACC-893 (ATCC CRL-1902), HCC38 (ATCC CRL-2314), HCC70 (CRL-2315), and other HCC cell lines (e.g., as deposited with the ATCC), AU565 (ATCC CRL-2351), Hs 496.T (ATCC CRL-7303), Hs 748.T (ATCC CRL-7486), SW527 (ATCC CRL-7940), 184A1(ATCC CRL-8798), MCF cell lines (e.g., 10A and others deposited with the ATCC), MDA-MB-134-VI (ATCC HTB-23 and other MDA cell lines), SK-BR-3 (ATCC HTB-30), ME-180 (ATCC HTB-33), Hs 578Bst (ATCC HTB-125), Hs 578T (ATCC HTB-126), T-47D (ATCC HTB-133), insect cells, such as Sf9 (S. frugipeda) and Drosophila, bacteria, such as E. coli, Streptococcus, bacillus, yeast, such as Sacharomyces, S. cerevisiae, fungal cells, plant cells, embryonic or adult stem cells (e.g., mammalian, such as mouse or human).

[0159] Expression control sequences are similarly selected for host compatibility and a desired purpose, e.g., high copy number, high amounts, induction, amplification, controlled expression. Other sequences which can be employed include enhancers such as from SV40, CMV, RSV, inducible promoters, cell-type specific elements, or sequences which allow selective or specific cell expression. Promoters that can be used to drive its expression, include, e.g., the endogenous promoter, MMTV, SV40, trp, lac, tac, or T7 promoters for bacterial hosts; or alpha factor, alcohol oxidase, or PGH promoters for yeast. RNA promoters can be used to produced RNA transcripts, such as T7 or SP6. See, e.g., Melton et al., Polynucleotide Res., 12(18):7035-7056, 1984; Dunn and Studier. J. Mol. Bio., 166:477-435, 1984; U.S. Pat. No. 5,891,636; Studier et al., Gene Expression Technology, Methods in Enzymology, 85:60-89, 1987. In addition, as discussed above, translational signals (including in-frame insertions) can be included.

[0160] When a polynucleotide is expressed as a heterologous gene in a transfected cell line, the gene is introduced into a cell as described above, under effective conditions in which the gene is expressed. The term “heterologous” means that the gene has been introduced into the cell line by the “hand-of-man.” Introduction of a gene into a cell line is discussed above. The transfected (or transformed) cell expressing the gene can be lysed or the cell line can be used intact.

[0161] For expression and other purposes, a polynucleotide can contain codons found in a naturally-occurring gene, transcript, or cDNA, for example, e.g., as set forth in SEQ ID NOS 1, 3, 5, 7, 9, 11, 13, 15, 17, 19, 21, 23, 25, 27, 29, 31, 33, 35, 37, 39, 41, 43, 45, 47, 49, 51, 53, 55, 57, 59, 61, 63, 65, 67, 69, 71, 73, 75, 77, 79, 81, 83, 85, 87, 89, 91, 115, 117, 118, 120, 123, 125, 127, 129, 131, 133, 135, 137, 139, 141, 143, 145, and/or 147, or it can contain degenerate codons coding for the same amino acid sequences. For instance, it may be desirable to change the codons in the sequence to optimize the sequence for expression in a desired host. See, e.g., U.S. Pat. Nos. 5,567,600 and 5,567,862.

[0162] A polypeptide according to the present invention can be recovered from natural sources, transformed host cells (culture medium or cells) according to the usual methods, including, detergent extraction (e.g., non-ionic detergent, Triton X-100, CHAPS, octylglucoside, Igepal CA-630), ammonium sulfate or ethanol precipitation, acid extraction, anion or cation exchange chromatography, phosphocellulose chromatography, hydrophobic interaction chromatography, hydroxyapatite chromatography, lectin chromatography, gel electrophoresis. Protein refolding steps can be used, as necessary, in completing the configuration of the mature protein. Finally, high performance liquid chromatography (HPLC) can be employed for purification steps. Another approach is express the polypeptide recombinantly with an affinity tag (Flag epitope, HA epitope, myc epitope, 6×His, maltose binding protein, chitinase, etc) and then purify by anti-tag antibody-conjugated affinity chromatography.

[0163] The present invention also relates to polypeptides corresponding to the genes of the present invention, e.g., an isolated human polypeptide comprising or having the amino acid sequence set forth in [SEQ ID NO], an isolated human polypeptide comprising an amino acid sequence having 90%, 92%, 95%, 97%, 98%, or more amino acid sequence identity to the amino acid sequence set forth in [SEQ ID NO], and optionally having one or more of its specific activities. Fragments specific to these polypeptides can be used, e.g., to produce antibodies or other immune responses, as competitors to activity, competitors to ligands and other binding-partners, etc. These fragments can be referred to as being “specific for” the polypeptide. The latter phrase, as already defined, indicates that the peptides are characteristic of it, and that the defined sequences are substantially absent from all other protein types. Such polypeptides can be of any size which is necessary to confer specificity, e.g., 5, 8, 10, 12, 15, 20, etc.

[0164] The present invention also relates to specific-binding partners. These include antibodies which are specific for polypeptides encoded by polynucleotides of the present invention, as well as other binding-partners which interact with polynucleotides and polypeptides of the present invention. Protein-protein interactions between polypeptides of the present invention and other polypeptides and binding partners can be identified using any suitable methods, e.g., protein binding assays (e.g., filtration assays, chromatography, etc.), yeast two-hybrid system (Fields and Song, Nature, 340: 245-247, 1989), protein arrays, gel-shift assays, FRET (fluorescence resonance energy transfer) assays, etc. Nucleic acid interactions (e.g., protein-DNA or protein-RNA) can be assessed using gel-shift assays, e.g., as carried out in U.S. Pat. Nos. 6,333,407 and 5,789,538.

[0165] The present invention also relates to antibodies, and other specific-binding partners, which are specific for polypeptides encoded by polynucleotides of the present invention. Antibodies, e.g., polyclonal, monoclonal, recombinant, chimeric, humanized, single-chain, Fab, and fragments thereof, can be prepared according to any desired method. See, also, screening recombinant immunoglobulin libraries (e.g., Orlandi et al., Proc. Natl. Acad. Sci., 86:3833-3837, 1989; Huse et al., Science, 256:1275-1281, 1989); in vitro stimulation of lymphocyte populations; Winter and Milstein, Nature, 349: 293-299, 1991. The antibodies can be IgM, IgG, subtypes, IgG2a, IgG 1, etc. Antibodies, and immune responses, can also be generated by administering naked DNA See, e.g., U.S. Pat. Nos. 5,703,055; 5,589,466; 5,580,859. Antibodies can be used from any source, including, goat, rabbit, mouse, chicken (e.g., IgY; see, Duan, WO/029444 for methods of making antibodies in avian hosts, and harvesting the antibodies from the eggs). An antibody specific for a polypeptide means that the antibody recognizes a defined sequence of amino acids within or including the polypeptide. Other specific binding partners include, e.g., aptamers and PNA, can be prepared against specific epitopes or domains of differentially regulated genes.

[0166] The preparation of polyclonal antibodies is well-known to those skilled in the art. See, for example, Green et al., Production of Polyclonal Antisera, in IMMUNOCHEMICAL PROTOCOLS (Manson, ed.), pages 1-5 (Humana Press 1992); Coligan et al., Production of Polyclonal Antisera in Rabbits, Rats, Mice and Hamsters, in CURRENT PROTOCOLS IN IMMUNOLOGY, section 2.4.1 (1992). The preparation of monoclonal antibodies likewise is conventional. See, for example, Kohler & Milstein, Nature 256:495 (1975); Coligan et al., sections 2.5.1-2.6.7; and Harlow et al., ANTIBODIES: A LABORATORY MANUAL, page 726 (Cold Spring Harbor Pub. 1988).

[0167] Antibodies can also be humanized, e.g., where they are to be used therapeutically. Humanized monoclonal antibodies are produced by transferring mouse complementarity determining regions from heavy and light variable chains of the mouse immunoglobulin into a human variable domain, and then substituting human residues in the framework regions of the murine counterparts. The use of antibody components derived from humanized monoclonal antibodies obviates potential problems associated with the immunogenicity of murine constant regions. General techniques for cloning murine immunoglobulin variable domains are described, for example, by Orlandi et al., Proc. Nat'l Acad. Sci. USA 86:3833 (1989), which is hereby incorporated in its entirety by reference. Techniques for producing humanized monoclonal antibodies are described, for example, in U.S. Pat. No. 6,054,297, Jones et al., Nature 321:522 (1986); Riechmann et al., Nature 332:323 (1988); Verhoeyen et al., Science 239:1534 (1988); Carter et al., Proc. Nat'l Acad. Sci. USA 89:4285 (1992); Sandhu, Crit. Rev. Biotech. 12: 437 (1992); and Singer et al., J. Immunol. 150: 2844 (1993).

[0168] Antibodies of the invention also may be derived from human antibody fragments isolated from a combinatorial immunoglobulin library. See, for example, Barbas et al., METHODS: A COMPANION TO METHODS IN ENZYMOLOGY, VOL. 2, page 119 (1991); Winter et al., Ann. Rev. Immunol. 12: 433 (1994). Cloning and expression vectors that are useful for producing a human immunoglobulin phage library can be obtained commercially, for example, from STRATAGENE Cloning Systems (La Jolla, Calif.).

[0169] In addition, antibodies of the present invention may be derived from a human monoclonal antibody. Such antibodies are obtained from transgenic mice that have been “engineered” to produce specific human antibodies in response to antigenic challenge. In this technique, elements of the human heavy and light chain loci are introduced into strains of mice derived from embryonic stem cell lines that contain targeted disruptions of the endogenous heavy and light chain loci. The transgenic mice can synthesize human antibodies specific for human antigens and can be used to produce human antibody-secreting hybridomas. Methods for obtaining human antibodies from transgenic mice are described, e.g., in Green et al., Nature Genet. 7:13 (1994); Lonberg et al., Nature 368:856 (1994); and Taylor et al., Int. Immunol. 6:579 (1994).

[0170] Antibody fragments of the present invention can be prepared by proteolytic hydrolysis of the antibody or by expression in E. coli of nucleic acid encoding the fragment. Antibody fragments can be obtained by pepsin or papain digestion of whole antibodies by conventional methods. For example, antibody fragments can be produced by enzymatic cleavage of antibodies with pepsin to provide a 5S fragment denoted F(ab′).sub.2. This fragment can be further cleaved using a thiol reducing agent, and optionally a blocking group for the sulfhydryl groups resulting from cleavage of disulfide linkages, to produce 3.5S Fab′ monovalent fragments. Alternatively, an enzymatic cleavage using pepsin produces two monovalent Fab′ fragments and an Fc fragment directly. These methods are described, for example, by Goldenberg, U.S. Pat. No. 4,036,945 and No. 4,331,647, and references contained therein. These patents are hereby incorporated in their entireties by reference. See also Nisoiihoff et al., Arch. Biochem. Biophys. 89:230 (1960); Porter, Biochem. J. 73:119 (1959); Edelman et al, METHODS IN ENZYMOLOGY, VOL. 1, page 422 (Academic Press 1967); and Coligan et al. at sections 2.8.1-2.8.10 and 2.10.1-2.10.4.

[0171] Other methods of cleaving antibodies, such as separation of heavy chains to form monovalent light-heavy chain fragments, further cleavage of fragments, or other enzymatic, chemical, or genetic techniques can also be used. For example, Fv fragments comprise an association of V.sub.H and V.sub.L chains. This association may be noncovalent, as described in Inbar et al., Proc. Nat'l Acad. Sci. USA 69:2659 (1972). Alternatively, the variable chains can be linked by an intermolecular disulfide bond or cross-linked by chemicals such as glutaraldehyde. See, e.g., Sandhu, supra. Preferably, the Fv fragments comprise V.sub.H and V.sub.L chains connected by a peptide linker. These single-chain antigen binding proteins (sFv) are prepared by constructing a structural gene comprising nucleic acid sequences encoding the V.sub.H and V.sub.L domains connected by an oligonucleotide. The structural gene is inserted into an expression vector, which is subsequently introduced into a host cell such as E. coli. The recombinant host cells synthesize a single polypeptide chain with a linker peptide bridging the two V domains. Methods for producing sFvs are described, for example, by Whitlow et al., METHODS: A COMPANION TO METHODS IN ENZYMOLOGY, VOL. 2, page 97 (1991); Bird et al., Science 242:423-426 (1988); Ladneret al., U.S. Pat. No. 4,946,778; Pack et al., Bio/Technology 11: 1271-77 (1993); and Sandhu, supra.

[0172] Another form of an antibody fragment is a peptide coding for a single complementarity-determining region (CDR). CDR peptides (“minimal recognition units”) can be obtained by constructing genes encoding the CDR of an antibody of interest. Such genes are prepared, for example, by using the polymerase chain reaction to synthesize the variable region from RNA of antibody-producing cells. See, for example, Larrick et al., METHODS: A COMPANION TO METHODS IN ENZYMOLOGY, VOL. 2, page 106 (1991).

[0173] The term “antibody” as used herein includes intact molecules as well as fragments thereof, such as Fab, F(ab′)₂, and Fv which are capable of binding to an epitopic determinant present in Bin1 polypeptide. Such antibody fragments retain some ability to selectively bind with its antigen or receptor. The term “epitope” refers to an antigenic determinant on an antigen to which the paratope of an antibody binds. Epitopic determinants usually consist of chemically active surface groupings of molecules such as amino acids or sugar side chains and usually have specific three dimensional structural characteristics, as well as specific charge characteristics. Antibodies can be prepared against specific epitopes or polypeptide domains.

[0174] Antibodies which bind to a differentially-regulated polypeptide of the present invention can be prepared using an intact polypeptide or fragments containing small peptides of interest as the immunizing antigen. For example, it may be desirable to produce antibodies that specifically bind to the N- or C-terminal domains of said polypeptide. The polypeptide or peptide used to immunize an animal which is derived from translated cDNA or chemically synthesized which can be conjugated to a carrier protein, if desired. Such commonly used carriers which are chemically coupled to the immunizing peptide include keyhole limpet hemocyanin (KLH), thyroglobulin, bovine serum albumin (BSA), and tetanus toxoid.

[0175] Polyclonal or monoclonal antibodies can be further purified, for example, by binding to and elution from a matrix to which the polypeptide or a peptide to which the antibodies were raised is bound. Those of skill in the art will know of various techniques common in the immunology arts for purification and/or concentration of polyclonal antibodies, as well as monoclonal antibodies (See for example, Coligan, et al., Unit 9, Current Protocols in Immunology, Wiley Interscience, 1994, incorporated by reference).

[0176] Anti-idiotype technology can also be used to produce invention monoclonal antibodies which mimic an epitope. For example, an anti-idiotypic monoclonal antibody made to a first monoclonal antibody will have a binding domain in the hypervariable region which is the “image” of the epitope bound by the first monoclonal antibody.

[0177] Methods of Detecting Polypeptides

[0178] Polypeptides coded for by a differentially-regulated gene of the present invention can be detected, visualized, determined, quantitated, etc. according to any effective method useful methods include, e.g., but are not limited to, immunoassays, RIA (radioimmunassay), ELISA, (enzyme-linked-immunosorbent assay), immunoflourescence, flow cytometry, histology, electron microscopy, light microscopy, in situ assays, immunoprecipitation, Western blot, etc.

[0179] Immunoassays may be carried in liquid or on biological support. For instance, a sample (e.g., blood, stool, urine, cells, tissue, body fluids, etc.) can be brought in contact with and immobilized onto a solid phase support or carrier such as nitrocellulose, or other solid support that is capable of immobilizing cells, cell particles or soluble proteins. The support may then be washed with suitable buffers followed by treatment with the detectably labeled differentially-regulated gene specific antibody. The solid phase support can then be washed with a buffer a second time to remove unbound antibody. The amount of bound label on solid support may then be detected by conventional means.

[0180] A “solid phase support or carrier” includes any support capable of binding an antigen, antibody, or other specific binding partner. Supports or carriers include glass, polystyrene, polypropylene, polyethylene, dextran, nylon, amylases, natural and modified celluloses, polyacrylamides, and magnetite. A support material can have any structural or physical configuration. Thus, the support configuration may be spherical, as in a bead, or cylindrical, as in the inside surface of a test tube, or the external surface of a rod. Alternatively, the surface may be flat such as a sheet, test strip, etc. Preferred supports include polystyrene beads

[0181] One of the many ways in which gene peptide-specific antibody can be detectably labeled is by linking it to an enzyme and using it in an enzyme immunoassay (EIA). See, e.g., Voller, A., “The Enzyme Linked Immunosorbent Assay (ELISA),” 1978, Diagnostic Horizons 2, 1-7, Microbiological Associates Quarterly Publication, Walkersville, Md.); Voller, A. et al., 1978, J. Clin. Pathol. 31, 507-520; Butler, J. E., 1981, Meth. Enzymol. 73, 482-523; Maggio, E. (ed.), 1980, Enzyme Imunoassay, CRC Press, Boca Raton, Fla. The enzyme which is bound to the antibody will react with an appropriate substrate, preferably a chromogenic substrate, in such a manner as to produce a chemical moiety that can be detected, for example, by spectrophotometric, fluorimetric or by visual means. Enzymes that can be used to detectably label the antibody include, but are not limited to, malate dehydrogenase, staphylococcal nuclease, delta-5-steroid isomerase, yeast alcohol dehydrogenase, .alpha.-glycerophosphate, dehydrogenase, triose phosphate isomerase, horseradish peroxidase, alkaline phosphatase, asparaginase, glucose oxidase, .beta.-galactosidase, ribonuclease, urease, catalase, glucose-6-phosphate dehydrogenase, glucoamylase and acetylcholinesterase. The detection can be accomplished by colorimetric methods that employ a chromogenic substrate for the enzyme. Detection may also be accomplished by visual comparison of the extent of enzymatic reaction of a substrate in comparison with similarly prepared standards.

[0182] Detection may also be accomplished using any of a variety of other immunoassays. For example, by radioactively labeling the antibodies or antibody fragments, it is possible to detect differentially-regulated peptides through the use of a radioimmunoassay (RIA). See, e.g., Weintraub, B., Principles of Radioimmunoassays, Seventh Training Course on Radioligand Assay Techniques, The Endocrine Society, March, 1986. The radioactive isotope can be detected by such means as the use of a gamma counter or a scintillation counter or by autoradiography.

[0183] It is also possible to label the antibody with a fluorescent compound. When the fluorescently labeled antibody is exposed to light of the proper wave length, its presence can then be detected due to fluorescence. Among the most commonly used fluorescent labeling compounds are fluorescein isothiocyanate, rhodamine, phycoerythrin, phycocyanin, allophycocyanin, o-phthaldehyde and fluorescamine. The antibody can also be detectably labeled using fluorescence emitting metals such as those in the lanthamide series. These metals can be attached to the antibody using such metal chelating groups as diethylenetriaminepentacetic acid (DTPA) or ethylenediaminetetraacetic acid (EDTA).

[0184] The antibody also can be detectably labeled by coupling it to a chemiluminescent compound. The presence of the chemiluminescent-tagged antibody is then determined by detecting the presence of luminescence that arises during the course of a chemical reaction.

[0185] Examples of useful chemiluminescent labeling compounds are luminol, isoluminol, theromatic acridinium ester, imidazole, acridinium salt and oxalate ester.

[0186] Likewise, a bioluminescent compound may be used to label the antibody of the present invention. Bioluminescence is a type of chemiluminescence found in biological systems in which a catalytic protein increases the efficiency of the chemiluminescent reaction. The presence of a bioluminescent protein is determined by detecting the presence of luminescence. Important bioluminescent compounds for purposes of labeling are luciferin, luciferase and aequorin.

[0187] Tissue and Disease

[0188] The normal female breast comprises ducts and lobuloalveolar structures surrounded by basement membranes and collagenous stroma with fibroblasts, vessels, and fat. The basic unit of function in the breast are the lobuloalveolar structures which produce the milk secretions. Each lobule drains into a lactiferous duct that empties into a lactiferous sinus beneath the nipple. The ducts are lined with epithelial cells, containing few mitochondria and sparse endoplasmic reticulum. The lobules contain luminal epithelial cells, basal epithelial cells, and myoepithelial cells. The basal and epithelial cells are sometimes grouped together. The luminal cells can be differentiated immuno-histochemically from the myoepithelial cells by their expression of keratins. The luminal cells stain with antibodies to keratin 5/6; the myoepithelial cells stains with antibodies against keratin 8/18. In addition to the presence of these cells types in the breast, there are endothelial cells associated with blood vessels, stromal cells that surround the lobular structures, adipose cells, and blood cells, such as T-lymphocytes and macrophages.

[0189] Breast carcinoma can be classified into two basic types, noninvasive (non-infiltrating) and invasive. Noninvasive carcinoma includes, e.g., intraductal carcinoma (also known as ductal carcinoma in situ or “DCIS”), intraductal papillary carcinoma, and lobular carcinoma in situ. Invasive carcinoma includes, e.g., invasive ductal carcinoma (“IDC”), invasive lobular carcinoma, medullary carcinoma, colloid carcinoma (mucinous carcinoma), Paget's disease, tubular carcinoma, adenoid cystic carcinoma, invasive comedocarcinoma, apocrine carcinoma, and invasive papillary carcinoma. See, also, Cancer, Principles and Practice of Oncology, DeVita et al., ed., J.B. Lippincott Company, 1982, Pages 914-922. The different cancers can generally be distinguished histologically from each other.

[0190] Over 90% of breast cancers arise in the ducts. As long as it remains with the ductal basement membranes, it is classified as a non-infiltrating or non-invasive carcinoma. DCIS is a common example. An invasive or infiltrating carcinoma shows a marked increase in dense fibrous tissue stroma, giving the tissue a hard consistency. IDC is one of the more common types of an invasive carcinoma. Frequently, an infiltrating carcinoma becomes invaded with blood and lymphatic vessels as it increases in size and malignancy. The tumor cells fill the ducts, plugging them, and invade the surrounding stroma. For general description of breast pathology, see, e.g., Robins Pathological Basis of Disease, Cotran et al., 4^{th} Edition, W. B. Saunders Company, 1989, Chapter 25.

[0191] The progression of a cancer, from its origin to a full-blown malignancy, is the subject of intense study. Hyperplasia is generally believed to precede at least some cancers, but not all hyperplasia leads to cancer, and the relationship between the two is not well understood. One hallmark of a hyperplasia that leads to cancer may be the occurrence of genomic instability, and other factors which lead to uncoupling of the cell cycle.

[0192] Intraepithelial neoplasia is one of the first detectable signs of a breast cancer, characterized by its confinement to the duct epithelia. It can also be referred to as preinvasive neoplasia, precancer, dysplasia, or CIS. See, e.g., Boone et al., Proc. Soc. Exp. Biol. Med., 216:151-165, 1997. An intraepithelial neoplasia generally consists of multiple foci of an abnormal clonal expansion of neoplastic cells. The development of the neoplasia is manifested by an increasing size of the lesion and a greater degree of cytonuclear morphological aberration, as it progresses from low grade to high grade. See, e.g., Bacus et al., Cancer Epid. Biom. Prevent., 8:1087-1094, 1999. An early grade can be referred to as an intraductal proliferation (IDP). More advanced, pre-invasive lesions are DCIS and LCIS (lobular carcinoma in situ). It is believed that DCIS and LCIS are precursor lesions of invasive breast cancer, such as IDC. See, e.g., Buerger et al., Mol. Pathol., 53:118-121, 2000.

[0193] Breast cancers can be both staged and graded. Stage is based on the tumor and size and whether the lymph nodes are involved with the tumor. Tumor grade refers to the tumor cells' appearance under the microscope, and how closely it resembles normal tissue of the same type. If the tumor cells look normal, then it can be termed “low grade.” High grade cells look markedly different from normal cells. High grade tumors tend to behave more aggressively than lower grade. An “ungraded” cancer indicates that the gene expression profile as described herein indicates that it has an expression profile of group DI genes.

[0194] The most widely used clinical staging system for breast cancer is one adopted by the UICC (International Union against Cancer). This system incorporates the TNM (t, tumor; N, nodes; M, metastases) classification using tumor size, involvement of the chest wall and skin, inflammatory cancer, involvement of nodes, evidence of metastases. See, e.g., Sainsbury et al., BMJ, 321:745-750, 2000. Other staging and grading systems can also be used, e.g., Bloom and Richardson grade (British J Cancer, 11:359-377, 1957), Columbia Clinical Classification (CCC), Van Nuys (VN), etc. Grading systems have also been devised based on image analysis of neoplastic and normal cells. Bacus et al. (Cancer Epid. Biom. Prevent., 8:1087-1094, 1999) have described an image morphometric nuclear grading system for intraepitheliam neoplastic lesions, such as DCIS, which provides objective criteria to assess tumor grade. See, also, Schwartz, Human Pathol., 28:1798-1802, 1997, for a grading system for DCIS. FISH has also been used to diagnose cancers based on chromosomal aberrations. See, e.g., Komoike et al., Breast Cancer, 7:332-336, 2000.

[0195] Various genetic bases for breast cancer have begun to be identified. For instance, BRCA 1, BRCA2, ATM, PTEN/MMAC1 (e.g., Ali et al., J Natl Cancer Inst., 91:1922-1932, 1999), MLH2, MSH2, TP53 (e.g., Done et al., Cancer Res., 58:785-789, 1998), and STK11 are associated with a higher risk of cancer. Other genes involved in breast cancer include, e.g., myc, cyclin D1 (e.g., Weinstat-Saslow et al., Nature Med., 1:1257-1260, 1995), and c-erb-B2.

[0196] Grading, Staging, Comparing, Assessing, Methods and Compositions

[0197] The present invention also relates to methods and compositions for staging and grading cancers. As already defined, staging relates to determining the extent of a cancer's spread, including its size and the degree to which other tissues, such as lymph nodes are involved in the cancer. Grading refers to the degree of a cell's retention of the characteristics of the tissue of its origin. A lower grade cancer comprises tumor cells that more closely resemble normal cells than a medium or higher grade cancer. Grading can be a useful diagnostic and prognostic tool. Higher grade cancers usually behave more aggressively than lower grade cancers. Thus, knowledge of the cancer grade, as well as its stage, can be a significant factor in the choice of the appropriate therapeutic intervention for the particular patient, e.g., surgery, radiation, chemotherapy, etc. Staging and grading can also be used in conjunction with a therapy to assess its efficacy, to determine prognosis, to determine effective dosages, etc.

[0198] Various methods of staging and grading cancers can be employed in accordance with the present invention. A “cell expression profile” or “cell expression fingerprint” is a representation of the expression of various different genes in a given cell or sample comprising cells. These cell expression profiles can be useful as reference standards. The cell expression fingerprints can be used alone for grading, or in combination with other grading methods.

[0199] The present invention also relates to methods and compositions for diagnosing a breast cancer, or determining susceptibility to a breast cancer, using polynucleotides, polypeptides, and specific-binding partners of the present invention to detect, assess, determine, etc., differentially-regulated genes of the present invention. In such methods, the gene can serve as a marker for breast cancer, e.g., where the gene, when mutant, is a direct cause of the breast cancer; where the gene is affected by another gene(s) which is directly responsible for the breast cancer, e.g., when the gene is part of the same signaling pathway as the directly responsible gene; and, where the gene is chromosomally linked to the gene(s) directly responsible for the breast cancer, and segregates with it. Many other situations are possible. To detect, assess, determine, etc., a probe specific for the gene can be employed as described above and below. Any method of detecting and/or assessing the gene can be used, including detecting expression of the gene using polynucleotides, antibodies, or other specific-binding partners.

[0200] The present invention relates to methods of diagnosing a disorder associated with breast cancer, or determining a subject's susceptibility to breast cancer, comprising, e.g., assessing the expression of a differentially-regulated gene in a tissue sample comprising tissue or cells suspected of having a breast cancer (e.g., where the sample comprises breast tissue). The phrase “diagnosing” indicates that it is determined whether the sample has a breast cancer. “Determining a subject's susceptibility to a breast cancer” indicates that the subject is assessed for whether s/he is predisposed to get such a disease or disorder, where the predisposition is indicated by abnormal expression of the gene (e.g., gene mutation, gene expression pattern is not normal, etc.). Predisposition or susceptibility to a disease may result when a such disease is influenced by epigenetic, environmental, etc., factors. This includes prenatal screening where samples from the fetus or embryo (e.g., via amniocentesis or CV sampling) are analyzed for the expression of the genes.

[0201] By the phrase “assessing expression of a differentially-regulated gene,” it is meant that the functional status of the gene is evaluated. This includes, but is not limited to, measuring expression levels of said gene, determining the genomic structure of said gene, determining the mRNA structure of transcripts from said gene, or measuring the expression levels of polypeptide coded for by said gene. Thus, the term “assessing expression” includes evaluating the all aspects of the transcriptional and translational machinery of the gene. For instance, if a promoter defect causes, or is suspected of causing, the disorder, then a sample can be evaluated (i.e., “assessed”) by looking (e.g., sequencing or restriction mapping) at the promoter sequence in the gene, by detecting transcription products (e.g., RNA), by detecting translation product (e.g., polypeptide). Any measure of whether the gene is functional can be used, including, polypeptide, polynucleotide, and functional assays for the gene's biological activity.

[0202] In making the assessment, it can be useful to compare the results to a normal gene, e.g., a gene which is not associated with the disorder. The nature of the comparison can be determined routinely, depending upon how the assessing is accomplished. If, for example, the mRNA levels of a sample is detected, then the mRNA levels of a normal can serve as a comparison, or a gene which is known not to be affected by the disorder. Methods of detecting mRNA are well known, and discussed above, e.g., but not limited to, Northern blot analysis, polymerase chain reaction (PCR), reverse transcriptase PCR, RACE PCR, etc.

[0203] Similarly, if polypeptide production is used to evaluate the gene, then the polypeptide in a normal tissue sample can be used as a comparison, or, polypeptide from a different gene whose expression is known not to be affected by the disorder. These are only examples of how such a method could be carried out.

[0204] Assessing the effects of therapeutic and preventative interventions (e.g., administration of a drug, chemotherapy, radiation, etc.) on breast cancer is a major effort in drug discovery, clinical medicine, and pharmacogenomics. The evaluation of therapeutic and preventative measures, whether experimental or already in clinical use, has broad applicability, e.g., in clinical trials, for monitoring the status of a patient, for analyzing and assessing animal models, and in any scenario involving cancer treatment and prevention. Analyzing the expression profiles of polynucleotides of the present invention can be utilized as a parameter by which interventions are judged and measured. Treatment of a disorder can change the expression profile in some manner which is prognostic or indicative of the drug's effect on it. Changes in the profile can indicate, e.g., drug toxicity, return to a normal level, etc. Accordingly, the present invention also relates to methods of monitoring or assessing a therapeutic or preventative measure (e.g., chemotherapy, radiation, anti-neoplastic drugs, antibodies, etc.) in a subject having breast cancer, or, susceptible to such a disorder, comprising, e.g., detecting the expression levels of one or more differentially-regulated genes of the present invention. A subject can be a cell-based assay system, non-human animal model, human patient, etc. Detecting can be accomplished as described for the methods above and below. By “therapeutic or preventative intervention,” it is meant, e.g., a drug administered to a patient, surgery, radiation, chemotherapy, and other measures taken to prevent, treat, or diagnose breast cancer.

[0205] Expression can be assessed in any sample comprising any tissue or cell type, body fluid, etc., as discussed for other methods of the present invention, including cells from breast cancer can be used, or cells derived from breast cancer. By the phrase “cells derived from breast cancer,” it is meant that the derived cells originate from breast cancer, e.g., when metastasis from a primary tumor site has occurred, when a progenitor-type or pluripotent cell gives rise to other cells, etc.

[0206] The present invention also relates to methods of using binding partners for differentially-regulated genes, such as antibodies, to deliver active agents to the breast for a variety of different purposes, including, e.g., for diagnostic, therapeutic (e.g., to treat cancer), and research purposes. Methods can involve delivering or administering an active agent to the breast cancer, comprising, e.g., administering to a subject in need thereof, an effective amount of an active agent coupled to a binding partner specific for a differentially-regulated gene polypeptide, wherein said binding partner is effective to deliver said active agent specifically to breast cancer.

[0207] Any type of active agent can be used in combination with the binding partner, including, therapeutic, cytotoxic, cytostatic, chemotherapeutic, anti-neoplastic, anti-proliferative, anti-biotic, etc., agents. A chemotherapeutic agent can be, e.g., DNA-interactive agent, alkylating agent, antimetabolite, tubulin-interactive agent, hormonal agent, hydroxyurea, Cisplatin, Cyclophosphamide, Altretamine, Bleomycin, Dactinomycin, Doxorubicin, Etoposide, Teniposide, paclitaxel, cytoxan, 2-methoxycarbonylaminobenzimidazole, Plicamycin, Methotrexate, Fluorouracil, Fluorodeoxyuridin, CB3717, Azacitidine, Floxuridine, Mercapyopurine, 6-Thioguanine, Pentostatin, Cytarabine, Fludarabine, etc. Agents can also be contrast agents useful in imaging technology, e.g., X-ray, CT, CAT, MRI, ultrasound, PET, SPECT, and scintographic.

[0208] An active agent can be associated in any manner with a binding partner which is effective to achieve its delivery specifically to the target. Specific delivery or targeting indicates that the agent is provided to the breast cancer, without being substantially provided to other tissues. This is useful especially where an agent is toxic, and specific targeting to the breast cancer enables the majority of the toxicity to be aimed at the breast cancer, with as small as possible effect on other tissues in the body. The association of the active agent and the binding partner (“coupling) can be direct, e.g., through chemical bonds between the binding partner and the agent, or, via a linking agent, or the association can be less direct, e.g., where the active agent is in a liposome, or other carrier, and the binding partner is associated with the liposome surface. In such case, the binding partner can be oriented in such a way that it is able to bind to the gene product on breast cell surface. Methods for delivery of DNA via a cell-surface receptor is described, e.g., in U.S. Pat. No. 6,339,139.

[0209] Identifying Agent Methods

[0210] The present invention also relates to methods of identifying agents, and the agents themselves, which modulate differentially regulated genes and gene products of the present invention. These agents can be used to modulate the biological activity of the polypeptide encoded for the gene, or the gene, itself. Agents which regulate the gene or its product are useful in variety of different environments, including as medicinal agents to treat or prevent disorders associated with differentially regulated genes and as research reagents to modify the function of tissues and cell.

[0211] Methods of identifying agents generally comprise steps in which an agent is placed in contact with the gene, transcription product, translation product, or other target, and then a determination is performed to assess whether the agent “modulates” the target. The specific method utilized will depend upon a number of factors, including, e.g., the target (i.e., is it the gene or polypeptide encoded by it), the environment (e.g., in vitro or in vivo), the composition of the agent, etc.

[0212] For modulating the expression of differentially-regulated genes of the present invention, a method can comprise, in any effective order, one or more of the following steps, e.g., contacting a differentially-regulated gene (e.g., in a cell population) with a test agent under conditions effective for said test agent to modulate the expression of said gene, and determining whether said test agent modulates said gene. An agent can modulate expression of a differentially-regulated gene at any level, including transcription, translation, and/or perdurance of the nucleic acid (e.g., degradation, stability, etc.) in the cell. For modulating the biological activity of polypeptides coded for by differentially-regulated genes, a method can comprise, in any effective order, one or more of the following steps, e.g., contacting a polypeptide (e.g., in a cell, lysate, or isolated) with a test agent under conditions effective for said test agent to modulate the biological activity of said polypeptide, and determining whether said test agent modulates said biological activity.

[0213] Contacting a differentially-regulated gene or polypeptide with the test agent can be accomplished by any suitable method and/or means that places the agent in a position to functionally control expression or biological activity of said gene or polypeptide present in the sample. Functional control indicates that the agent can exert its physiological effect on the gene or polypeptide through whatever mechanism it works. The choice of the method and/or means can depend upon the nature of the agent and the condition and type of environment in which the gene or polypeptide is presented, e.g., lysate, isolated, or in a cell population (such as, in vivo, in vitro, organ explants, etc.). For instance, if the cell population is an in vitro cell culture, the agent can be contacted with the cells by adding it directly into the culture medium. If the agent cannot dissolve readily in an aqueous medium, it can be incorporated into liposomes, or another lipophilic carrier, and then administered to the cell culture. Contact can also be facilitated by incorporation of agent with carriers and delivery molecules and complexes, by injection, by infusion, etc.

[0214] Agents can be directed to, or targeted to, any part of the polypeptide which is effective for modulating it. For example, agents, such as antibodies and small molecules, can be targeted to cell-surface, exposed, extracellular, ligand binding, functional, etc., domains of the polypeptide. Agents can also be directed to intracellular regions and domains, e.g., regions where the polypeptide couples or interacts with intracellular or intramembrane binding partners.

[0215] After the agent has been administered in such a way that it can gain access to the gene or polypeptide, it can be determined whether the test agent modulates their expression or biological activity. Modulation can be of any type, quality, or quantity, e.g., increase, facilitate, enhance, up-regulate, stimulate, activate, amplify, augment, induce, decrease, down-regulate, diminish, lessen, reduce, etc. The modulatory quantity can also encompass any value, e.g., 1%, 5%, 10%, 50%, 75%, 1-fold, 2-fold, 5-fold, 10-fold, 100-fold, etc. To modulate gene expression means, e.g., that the test agent has an effect on its expression, e.g., to effect the amount of transcription, to effect RNA splicing, to effect translation of the RNA into polypeptide, to effect RNA or polypeptide stability, to effect polyadenylation or other processing of the RNA, to effect post-transcriptional or post-translational processing, etc. To modulate biological activity means, e.g., that a functional activity of the polypeptide is changed in comparison to its normal activity in the absence of the agent. This effect includes, increase, decrease, block, inhibit, enhance, etc.

[0216] A test agent can be of any molecular composition, e.g., chemical compounds, biomolecules, such as polypeptides, lipids, nucleic acids (e.g., antisense to a polynucleotide sequence selected from SEQ ID NOS 1, 3, 5, 7, 9, 11, 13, 15, 17, 19, 21, 23, 25, 27, 29, 31, 33, 35, 37, 39, 41, 43, 45, 47, 49, 51, 53, 55, 57, 59, 61, 63, 65, 67, 69, 71, 73, 75, 77, 79, 81, 83, 85, 87, 89, 91, 115, 117, 118, 120, 123, 125, 127, 129, 131, 133, 135, 137, 139, 141, 143, 145, and/or 147), carbohydrates, antibodies, ribozymes, double-stranded RNA, aptamers, etc. For example, if a polypeptide to be modulated is a cell-surface molecule, a test agent can be an antibody that specifically recognizes it and, e.g., causes the polypeptide to be internalized, leading to its down regulation on the surface of the cell. Such an effect does not have to be permanent, but can require the presence of the antibody to continue the down-regulatory effect. Antibodies can also be used to modulate the biological activity a polypeptide in a lysate or other cell-free form. Antisense can also be used as test agents to modulate gene expression.

[0217] Markers

[0218] The polynucleotides of the present invention can be used with other markers, especially breast and breast cancer markers to identity, detect, stage, diagnosis, determine, prognosticate, treat, etc., tissue, diseases and conditions, etc, of the breast. Markers can be polynucleotides, polypeptides, antibodies, ligands, specific binding partners, etc. The targets for such markers include, but are not limited genes and polypeptides that are selective for cell types present in the breast. Specific targets include, BRCA1, BRCA2, ATM, PTEN/MMAC1 (e.g., Ali et al., J. Natl. Cancer Inst., 91:1922-1932, 1999), MLH2, MSH2, TP53 (e.g., Done et al., Cancer Res., 58:785-789, 1998), STK 11, myc, cyclin D1 (e.g., Weinstat-Saslow et al., Nature Med., 1:1257-1260, 1995), c-erb-B2, keratins, such as 5/6 and 8/18.

[0219] Therapeutics

[0220] Selective polynucleotides, polypeptides, and specific-binding partners thereto, can be utilized in therapeutic applications, especially to treat breast cancer. Useful methods include, but are not limited to, immunotherapy (e.g., using specific-binding partners to polypeptides), vaccination (e.g., using a selective polypeptide or a naked DNA encoding such polypeptide), protein or polypeptide replacement therapy, gene therapy (e.g., germ-line correction, antisense), etc.

[0221] Various immunotherapeutic approaches can be used. For instance, unlabeled antibody that specifically recognizes a tissue-specific antigen can be used to stimulate the body to destroy or attack the cancer, to cause down-regulation, to produce complement-mediated lysis, to inhibit cell growth, etc., of target cells which display the antigen, e.g., analogously to how c-erbB-2 antibodies are used to treat breast cancer. In addition, antibody can be labeled or conjugated to enhance its deleterious effect, e.g., with radionuclides and other energy emitting entitities, toxins, such as ricin, exotoxin A (ETA), and diphtheria, cytotoxic or cytostatic agents, immunomodulators, chemotherapeutic agents, etc. See, e.g., U.S. Pat. No. 6,107,090.

[0222] An antibody or other specific-binding partner can be conjugated to a second molecule, such as a cytotoxic agent, and used for targeting the second molecule to a tissue-antigen positive cell (Vitetta, E. S. et al., 1993, Immunotoxin therapy, in DeVita, Jr., V. T. et al., eds, Cancer: Principles and Practice of Oncology, 4th ed., J. B. Lippincott Co., Philadelphia, 2624-2636). Examples of cytotoxic agents include, but are not limited to, antimetabolites, alkylating agents, anthracyclines, antibiotics, anti-mitotic agents, radioisotopes and chemotherapeutic agents. Further examples of cytotoxic agents include, but are not limited to ricin, doxorubicin, daunorubicin, taxol, ethidium bromide, mitomycin, etoposide, tenoposide, vincristine, vinblastine, colchicine, dihydroxy anthracin dione, actinomycin D, 1-dehydrotestosterone, diptheria toxin, Pseudomonas exotoxin (PE) A, PE40, abrin, elongation factor-2 and glucocorticoid. Techniques for conjugating therapeutic agents to antibodies are well.

[0223] In addition to immunotherapy, polynucleotides and polypeptides can be used as targets for non-immunotherapeutic applications, e.g., using compounds which interfere with function, expression (e.g., antisense as a therapeutic agent), assembly, etc. RNA interference can be used in vitro and in vivo to silence differentially-expressed genes when its expression contributes to a disease (but also for other purposes, e.g., to identify the gene's function to change a developmental pathway of a cell, etc.). See, e.g., Sharp and Zamore, Science, 287:2431-2433, 2001; Grishok et al., Science, 287:2494, 2001.

[0224] Delivery of therapeutic agents can be achieved according to any effective method, including, liposomes, viruses, plasmid vectors, bacterial delivery systems, orally, systemically, etc. Therapeutic agents of the present invention can be administered in any form by any effective route, including, e.g., oral, parenteral, enteral, intraperitoneal, topical, transdermal (e.g., using any standard patch), ophthalmic, nasally, local, non-oral, such as aerosal, inhalation, subcutaneous, intramuscular, buccal, sublingual, rectal, vaginal, intra-arterial, and intrathecal, etc. They can be administered alone, or in combination with any ingredient(s), active or inactive.

[0225] In addition to therapeutics, per se, the present invention also relates to methods of treating breast cancer showing altered expression of differentially-regulated genes, such as SEQ ID NOS 1-92 and 116-147, comprising, e.g., administering to a subject in need thereof a therapeutic agent which is effective for regulating expression of said genes and/or which is effective in treating said disease. The term “treating” is used conventionally, e.g., the management or care of a subject for the purpose of combating, alleviating, reducing, relieving, improving the condition of, etc., of a disease or disorder. By the phrase “altered expression,” it is meant that the disease is associated with a mutation in the gene, or any modification to the gene (or corresponding product) which affects its normal function. Thus, expression of a differentially-regulated gene refers to, e.g., transcription, translation, splicing, stability of the mRNA or protein product, activity of the gene product, differential expression, etc.

[0226] Any agent which “treats” the disease can be used. Such an agent can be one which regulates the expression of the gene. Expression refers to the same acts already mentioned, e.g. transcription, translation, splicing, stability of the mRNA or protein product, activity of the gene product, differential expression, etc. For instance, if the condition was a result of a complete deficiency of the gene product, administration of gene product to a patient would be said to treat the disease and regulate the gene's expression. Many other possible situations are possible, e.g., where the gene is aberrantly expressed, and the therapeutic agent regulates the aberrant expression by restoring its normal expression pattern.

[0227] Antisense

[0228] Antisense polynucleotide (e.g., RNA) can also be prepared from a polynucleotide according to the present invention, preferably an anti-sense to a sequence of SEQ ID NOS 1, 3, 5, 7, 9, 11, 13, 15, 17, 19, 21, 23, 25, 27, 29, 31, 33, 35, 37, 39, 41, 43, 45, 47, 49, 51, 53, 55, 57, 59, 61, 63, 65, 67, 69, 71, 73, 75, 77, 79, 81, 83, 85, 87, 89, 91, 115, 117, 118, 120, 123, 125, 127, 129, 131, 133, 135, 137, 139, 141, 143, 145, and/or 147. Antisense polynucleotide can be used in various ways, such as to regulate or modulate expression of the polypeptides they encode, e.g., inhibit their expression, for in situ hybridization, for therapeutic purposes, for making targeted mutations (in vivo, triplex, etc.) etc. For guidance on administering and designing anti-sense, see, e.g., U.S. Pat. Nos. 6,200,960, 6,200,807, 6,197,584, 6,190,869, 6,190,661, 6,187,587, 6,168,950, 6,153,595, 6,150,162, 6,133,246, 6,117,847, 6,096,722, 6,087,343, 6,040,296, 6,005,095, 5,998,383, 5,994,230, 5,891,725, 5,885,970, and 5,840,708. An antisense polynucleotides can be operably linked to an expression control sequence. A total length of about 35 bp can be used in cell culture with cationic liposomes to facilitate cellular uptake, but for in vivo use, preferably shorter oligonucleotides are administered, e.g. 25 nucleotides.

[0229] Antisense polynucleotides can comprise modified, nonnaturally-occurring nucleotides and linkages between the nucleotides (e.g., modification of the phosphate-sugar backbone; methyl phosphonate, phosphorothioate, or phosphorodithioate linkages; and 2′-O-methyl ribose sugar units), e.g., to enhance in vivo or in vitro stability, to confer nuclease resistance, to modulate uptake, to modulate cellular distribution and compartmentalization, etc. Any effective nucleotide or modification can be used, including those already mentioned, as known in the art, etc., e.g., disclosed in U.S. Pat. Nos. 6,133,438; 6,127,533; 6,124,445; 6,121,437; 5,218,103 (e.g., nucleoside thiophosphoramidites); 4,973,679; Sproat et al., “2′-O-Methyloligoribonucleotides: synthesis and applications,” Oligonucleotides and Analogs A Practical Approach, Eckstein (ed.), IRL Press, Oxford, 1991, 49-86; Iribarren et al., “2′-O-Alkyl Oligoribonucleotides as Antisense Probes,” Proc. Natl. Acad. Sci. USA, 1990, 87, 7747-7751; Cotton et al., “2′-O-methyl, 2′-O-ethyl oligoribonucleotides and phosphorothioate oligodeoxyribonucleotides as inhibitors of the in vitro U7 snRNP-dependent mRNA processing event,” Nucl. Acids Res., 1991, 19, 2629-2635.

[0230] Arrays

[0231] The present invention also relates to an ordered array of polynucleotide probes and specific-binding partners (e.g., antibodies) for detecting the expression of differentially-regulated genes in a sample, comprising, one or more polynucleotide probes or specific binding partners associated with a solid support, wherein each probe is specific for said genes, and the probes comprise a nucleotide sequence of SEQ ID NOS 1, 3, 5, 7, 9, 11, 13, 15, 17, 19, 21, 23, 25, 27, 29, 31, 33, 35, 37, 39, 41, 43, 45, 47, 49, 51, 53, 55, 57, 59, 61, 63, 65, 67, 69, 71, 73, 75, 77, 79, 81, 83, 85, 87, 89, 91, 115, 117, 118, 120, 123, 125, 127, 129, 131, 133, 135, 137, 139, 141, 143, 145, and/or 147, which is specific for said gene, a nucleotide sequence having sequence identity to SEQ ID NOS 1, 3, 5, 7, 9, 11, 13, 15, 17, 19, 21, 23, 25, 27, 29, 31, 33, 35, 37, 39, 41, 43, 45, 47, 49, 51, 53, 55, 57, 59, 61, 63, 65, 67, 69, 71, 73, 75, 77, 79, 81, 83, 85, 87, 89, 91, 115, 117, 118, 120, 123, 125, 127, 129, 131, 133, 135, 137, 139, 141, 143, 145, and/or 147, which is specific for said gene or polynucleotide, or complements thereto, or a specific-binding partner which is specific for said genes.

[0232] The phrase “ordered array” indicates that the probes are arranged in an identifiable or position-addressable pattern, e.g., such as the arrays disclosed in U.S. Pat. Nos. 6,156,501, 6,077,673, 6,054,270, 5,723,320, 5,700,637, WO09919711, WO00023803. The probes are associated with the solid support in any effective way. For instance, the probes can be bound to the solid support, either by polymerizing the probes on the substrate, or by attaching a probe to the substrate. Association can be, covalent, electrostatic, noncovalent, hydrophobic, hydrophilic, noncovalent, coordination, adsorbed, absorbed, polar, etc. When fibers or hollow filaments are utilized for the array, the probes can fill the hollow orifice, be absorbed into the solid filament, be attached to the surface of the orifice, etc. Probes can be of any effective size, sequence identity, composition, etc., as already discussed.

[0233] Ordered arrays can further comprise polynucleotide probes or specific-binding partners which are specific for other genes, including genes specific for breast cancer or disorders associated with breast tissue.

[0234] Transgenic Animals

[0235] The present invention also relates to transgenic animals comprising differentially-regulated genes (and corresponding homologs thereof) of the present invention. Such genes, as discussed in more detail below, include, but are not limited to, functionally-disrupted genes, mutated genes, ectopically or selectively-expressed genes, inducible or regulatable genes, etc. These transgenic animals can be produced according to any suitable technique or method, including homologous recombination, mutagenesis (e.g., ENU, Rathkolb et al., Exp. Physiol., 85(6):635-644, 2000), and the tetracycline-regulated gene expression system (e.g., U.S. Pat. No. 6,242,667). The term “gene” as used herein includes any part of a gene, i.e., regulatory sequences, promoters, enhancers, exons, introns, coding sequences, etc. The nucleic acid present in the construct or transgene can be naturally-occurring wild-type, polymorphic, or mutated. When a mouse or other mammal is used, the appropriate homolog can be used in place of a human gene of the present invention.

[0236] Along these lines, polynucleotides of the present invention can be used to create transgenic animals, e.g. a non-human animal, comprising at least one cell whose genome comprises a functional disruption of a differentially-regulated gene of the present invention (including homologs of them). By the phrases “functional disruption” or “functionally disrupted,” it is meant that the gene does not express a biologically-active product. It can be substantially deficient in at least one functional activity coded for by the gene. Expression of a polypeptide can be substantially absent, i.e., essentially undetectable amounts are made. However, polypeptide can also be made, but which is deficient in activity, e.g., where only an amino-terminal portion of the gene product is produced.

[0237] Functional disruptions can be made to the regions of the gene which are specific or unique to that gene, e.g., as disclosed herein. For instance, BCU0021 has a unique N-terminal region (e.g., amino acids 1-105 not shared by publicly available genes). A functional disruption can be made in this portion of the gene, or upstream to it. The transgenic animal can comprise one or more cells. When substantially all its cells contain the engineered gene, it can be referred to as a transgenic animal “whose genome comprises” the engineered gene. This indicates that the endogenous gene loci of the animal has been modified and substantially all cells contain such modification.

[0238] Functional disruption of the gene can be accomplished in any effective way, including, e.g., introduction of a stop codon into any part of the coding sequence such that the resulting polypeptide is biologically inactive (e.g., because it lacks a catalytic domain, a ligand binding domain, etc.), introduction of a mutation into a promoter or other regulatory sequence that is effective to turn it off, or reduce transcription of the gene, insertion of an exogenous sequence into the gene which inactivates it (e.g., which disrupts the production of a biologically-active polypeptide or which disrupts the promoter or other transcriptional machinery), deletion of sequences from the a differentially-regulated gene, etc. Examples of transgenic animals having functionally disrupted genes are well known, e.g., as described in U.S. Pat. Nos. 6,239,326, 6,225,525, 6,207,878, 6,194,633, 6,187,992, 6,180,849, 6,177,610, 6,100,445, 6,087,555, 6,080,910, 6,069,297, 6,060,642, 6,028,244, 6,013,858, 5,981,830, 5,866,760, 5,859,314, 5,850,004, 5,817,912, 5,789,654, 5,777,195, and 5,569,824. A transgenic animal which comprises the functional disruption can also be referred to as a “knock-out” animal, since the biological activity of its a differentially-regulated gene has been “knocked-out.” Knock-outs can be homozygous or heterozygous.

[0239] For creating functional disrupted genes, and other gene mutations, homologous recombination technology is of special interest since it allows specific regions of the genome to be targeted. Using homologous recombination methods, genes can be specifically-inactivated, specific mutations can be introduced, and exogenous sequences can be introduced at specific sites. These methods are well known in the art, e.g., as described in the patents above. See, also, Robertson, Biol. Reproduc., 44(2):238-245, 1991. Generally, the genetic engineering is performed in an embryonic stem (ES) cell, or other pluripotent cell line (e.g., adult stem cells, EG cells), and that genetically-modified cell (or nucleus) is used to create a whole organism. Nuclear transfer can be used in combination with homologous recombination technologies.

[0240] For example, a differentially-regulated gene locus can be disrupted in mouse ES cells using a positive-negative selection method (e.g., Mansour et al., Nature, 336:348-352, 1988). In this method, a targeting vector can be constructed which comprises a part of the gene to be targeted. A selectable marker, such as neomycin resistance genes, can be inserted into a a differentially-regulated gene exon present in the targeting vector, disrupting it. When the vector recombines with the ES cell genome, it disrupts the function of the gene. The presence in the cell of the vector can be determined by expression of neomycin resistance. See, e.g., U.S. Pat. No. 6,239,326. Cells having at least one functionally disrupted gene can be used to make chimeric and germline animals, e.g., animals having somatic and/or germ cells comprising the engineered gene. Homozygous knock-out animals can be obtained from breeding heterozygous knock-out animals. See, e.g., U.S. Pat. No. 6,225,525.

[0241] A transgenic animal, or animal cell, lacking one or more functional differentially-regulated genes can be useful in a variety of applications, including, as an animal model for cancer, for drug screening assays, as a source of tissues deficient in said gene activity, and any of the utilities mentioned in any issued U.S. Patent on transgenic animals, including, U.S. Pat. Nos. 6,239,326, 6,225,525, 6,207,878, 6,194,633, 6,187,992, 6,180,849, 6,177,610, 6,100,445, 6,087,555, 6,080,910, 6,069,297, 6,060,642, 6,028,244, 6,013,858, 5,981,830, 5,866,760, 5,859,314, 5,850,004, 5,817,912, 5,789,654, 5,777,195, and 5,569,824.

[0242] The present invention also relates to non-human, transgenic animal whose genome comprises recombinant a differentially-regulated gene nucleic acid operatively linked to an expression control sequence effective to express said coding sequence, e.g., in breast cancer such a transgenic animal can also be referred to as a “knock-in” animal since an exogenous gene has been introduced, stably, into its genome.

[0243] A recombinant a differentially-regulated gene nucleic acid refers to a gene which has been introduced into a target host cell and optionally modified, such as cells derived from animals, plants, bacteria, yeast, etc. A recombinant a differentially-regulated gene includes completely synthetic nucleic acid sequences, semi-synthetic nucleic acid sequences, sequences derived from natural sources, and chimeras thereof. “Operable linkage” has the meaning used through the specification, i.e., placed in a functional relationship with another nucleic acid. When a gene is operably linked to an expression control sequence, as explained above, it indicates that the gene (e.g., coding sequence) is joined to the expression control sequence (e.g., promoter) in such a way that facilitates transcription and translation! of the coding sequence. As described above, the phrase “genome” indicates that the genome of the cell has been modified. In this case, the recombinant a differentially-regulated gene has been stably integrated into the genome of the animal. The a differentially-regulated gene nucleic acid in operable linkage with the expression control sequence can also be referred to as a construct or transgene.

[0244] Any expression control sequence can be used depending on the purpose. For instance, if selective expression is desired, then expression control sequences which limit its expression can be selected. These include, e.g., tissue or cell-specific promoters, introns, enhancers, etc. For various methods of cell and tissue-specific expression, see, e.g., U.S. Pat. Nos. 6,215,040, 6,210,736, and 6,153,427. These also include the endogenous promoter, i.e., the coding sequence can be operably linked to its own promoter. Inducible and regulatable promoters can also be utilized.

[0245] The present invention also relates to a transgenic animal which contains a functionally disrupted and a transgene stably integrated into the animals genome. Such an animal can be constructed using combinations any of the above- and below-mentioned methods. Such animals have any of the aforementioned uses, including permitting the knock-out of the normal gene and its replacement with a mutated gene. Such a transgene can be integrated at the endogenous gene locus so that the functional disruption and “knock-in” are carried out in the same step.

[0246] In addition to the methods mentioned above, transgenic animals can be prepared according to known methods, including, e.g., by pronuclear injection of recombinant genes into pronuclei of 1-cell embryos, incorporating an artificial yeast chromosome into embryonic stem cells, gene targeting methods, embryonic stem cell methodology, cloning methods, nuclear transfer methods. See, also, e.g., U.S. Pat. Nos. 4,736,866; 4,873,191; 4,873,316; 5,082,779; 5,304,489; 5,174,986; 5,175,384; 5,175,385; 5,221,778; Gordon et al., Proc. Natl. Acad. Sci., 77:7380-7384, 1980; Palmiter et al., Cell, 41:343-345, 1985; Palmiter et al., Ann. Rev. Genet., 20:465499, 1986; Askew et al., Mol. Cell. Bio., 13:4115-4124, 1993; Games et al. Nature, 373:523-527, 1995; Valancius and Smithies, Mol. Cell. Bio., 11: 1402-1408, 1991; Stacey et al., Mol. Cell. Bio., 14:1009-1016, 1994; Hasty et al., Nature, 350:243-246, 1995; Rubinstein et al., Nucl. Acid Res., 21:2613-2617,1993; Cibelli et al., Science, 280:1256-1258, 1998. For guidance on recombinase excision systems, see, e.g., U.S. Pat. Nos. 5,626,159, 5,527,695, and 5,434,066. See also, Orban, P. C., et al., “Tissue- and Site-Specific DNA Recombination in Transgenic Mice,” Proc. Natl. Acad. Sci. USA, 89:6861-6865 (1992); O'Gorman, S., et al., “Recombinase-Mediated Gene Activation and Site-Specific Integration in Mammalian Cells,” Science, 251:1351-1355 (1991); Sauer, B., et al., “Cre-stimulated recombination at loxP-Containing DNA sequences placed into the mammalian genome,” Polynucleotides Research, 17(1): 147-161 (1989); Gagneten, S. et al. (1997) Nucl. Acids Res. 25:3326-3331; Xiao and Weaver (1997) Nucl. Acids Res. 25:2985-2991; Agah, R. et al. (1997) J. Clin. Invest. 100: 169-179; Barlow, C. et al. (1997) Nucl. Acids Res. 25:2543-2545; Araki, K. et al. (1997) Nucl. Acids Res. 25:868-872; Mortensen, R. N. et al. (1992) Mol. Cell. Biol. 12:2391-2395 (G418 escalation method); Lakhlani, P. P. et al. (1997) Proc. Natl. Acad. Sci. USA 94:9950-9955 (“hit and run”); Westphal and Leder (1997) Curr. Biol. 7:530-533 (transposon-generated “knock-out” and “knock-in”); Templeton, N. S. et al. (1997) Gene Ther. 4:700-709 (methods for efficient gene targeting, allowing for a high frequency of homologous recombination events, e.g., without selectable markers); PCT International Publication WO 93/22443 (functionally-disrupted).

[0247] A polynucleotide according to the present invention can be introduced into any non-human animal, including a non-human mammal, mouse (Hogan et al., Manipulating the Mouse Embryo: A Laboratory Manual, Cold Spring Harbor Laboratory, Cold Spring Harbor, N.Y., 1986), pig (Hammer et al., Nature, 315:343-345, 1985), sheep (Hammer et al., Nature, 315:343-345, 1985), cattle, rat, or primate. See also, e.g., Church, 1987, Trends in Biotech 5:13-19; Clark et al., Trends in Biotech. 5:20-24, 1987); and DePamphilis et al., BioTechniques, 6:662-680, 1988. Transgenic animals can be produced by the methods described in U.S. Pat. No. 5,994,618, and utilized for any of the utilities described therein.

[0248] Database

[0249] The present invention also relates to electronic forms of polynucleotides, polypeptides, etc., of the present invention, including computer-readable medium (e.g., magnetic, optical, etc., stored in any suitable format, such as flat files or hierarchical files) which comprise such sequences, or fragments thereof, e-commerce-related means, etc. Along these lines, the present invention relates to methods of retrieving gene sequences from a computer-readable medium, comprising, one or more of the following steps in any effective order, e.g., selecting a cell or gene expression profile, e.g., a profile that specifies that said gene is differentially expressed in breast cancer, and retrieving said differentially expressed gene sequences, where the gene sequences consist of the genes represented by SEQ ID NOS 1, 3, 5, 7, 9, 11, 13, 15, 17, 19, 21, 23, 25, 27, 29, 31, 33, 35, 37, 39, 41, 43, 45, 47, 49, 51, 53, 55, 57, 59, 61, 63, 65, 67, 69, 71, 73, 75, 77, 79, 81, 83, 85, 87, 89, 91, 115, 117, 118, 120, 123, 125, 127, 129, 131, 133, 135, 137, 139, 141, 143, 145, 147, or homologs and variants thereof.

[0250] A “gene expression profile” means the list of tissues, cells, etc., in which a defined gene is expressed (i.e, transcribed and/or translated). A “cell expression profile” means the genes which are expressed in the particular cell type. The profile can be a list of the tissues in which the gene is expressed, but can include additional information as well, including level of expression (e.g., a quantity as compared or normalized to a control gene), and information on temporal (e.g., at what point in the cell-cycle or developmental program) and spatial expression. By the phrase “selecting a gene or cell expression profile,” it is meant that a user decides what type of gene or cell expression pattern he is interested in retrieving, e.g., he may require that the gene is differentially expressed in a tissue, or he may require that the gene is not expressed in blood, but must be expressed in breast tissue. Any pattern of expression preferences may be selected. The selecting can be performed by any effective method. In general, “selecting” refers to the process in which a user forms a query that is used to search a database of gene expression profiles. The step of retrieving involves searching for results in a database that correspond to the query set forth in the selecting step. Any suitable algorithm can be utilized to perform the search query, including algorithms that look for matches, or that perform optimization between query and data. The database is information that has been stored in an appropriate storage medium, having a suitable computer-readable format. Once results are retrieved, they can be displayed in any suitable format, such as HTML.

[0251] For instance, the user may be interested in identifying genes that are differentially expressed in a breast cancer. He may not care whether small amounts of expression occur in other tissues, as long as such genes are not expressed in peripheral blood lymphocytes (see above for examples). A query is formed by the user to retrieve the set of genes from the database having the desired gene or cell expression profile. Once the query is inputted into the system, a search algorithm is used to interrogate the database, and retrieve results.

[0252] Advertising, Licensing, Etc., Methods

[0253] The present invention also relates to methods of advertising, licensing, selling, purchasing, brokering, etc., genes, polynucleotides, specific-binding partners, antibodies, etc., of the present invention. Methods can comprises, e.g., displaying a a differentially-regulated gene gene, a differentially-regulated gene polypeptide, or antibody specific for a differentially-regulated gene in a printed or computer-readable medium (e.g., on the Web or Internet), accepting an offer to purchase said gene, polypeptide, or antibody.

[0254] Other

[0255] A polynucleotide, probe, polypeptide, antibody, specific-binding partner, etc., according to the present invention can be isolated. The term “isolated” means that the material is in a form in which it is not found in its original environment or in nature, e.g., more concentrated, more purified, separated from component, etc. An isolated polynucleotide includes, e.g., a polynucleotide having the sequenced separated from the chromosomal DNA found in a living animal, e.g., as the complete gene, a transcript, or a cDNA. This polynucleotide can be part of a vector or inserted into a chromosome (by specific gene-targeting or by random integration at a position other than its normal position) and still be isolated in that it is not in a form that is found in its natural environment. A polynucleotide, polypeptide, etc., of the present invention can also be substantially purified. By substantially purified, it is meant that polynucleotide or polypeptide is separated and is essentially free from other polynucleotides or polypeptides, i.e., the polynucleotide or polypeptide is the primary and active constituent. A polynucleotide can also be a recombinant molecule. By “recombinant,” it is meant that the polynucleotide is an arrangement or form which does not occur in nature. For instance, a recombinant molecule comprising a promoter sequence would not encompass the naturally-occurring gene, but would include the promoter operably linked to a coding sequence not associated with it in nature, e.g., a reporter gene, or a truncation of the normal coding sequence.

[0256] The term “marker” is used herein to indicate a means for detecting or labeling a target. A marker can be a polynucleotide (usually referred to as a “probe”), polypeptide (e.g., an antibody conjugated to a detectable label), PNA, or any effective material.

[0257] The topic headings set forth above are meant as guidance where certain information can be found in the application, but are not intended to be the only source in the application where information on such topic can be found.

[0258] Reference Materials

[0259] For other aspects of the polynucleotides, reference is made to standard textbooks of molecular biology. See, e.g., Hames et al., Polynucleotide Hybridization, IL Press, 1985; Davis et al., Basic Methods in Molecular Biology, Elsevir Sciences Publishing, Inc., New York, 1986; Sambrook et al., Molecular Cloning, CSH Press, 1989; Howe, Gene Cloning and Manipulation, Cambridge University Press, 1995; Ausubel et al., Current Protocols in Molecular Biology, John Wiley & Sons, Inc., 1994-1998.

[0260] Without further elaboration, it is believed that one skilled in the art can, using the preceding description, utilize the present invention to its fullest extent. The following preferred specific embodiments are, therefore, to be construed as merely illustrative, and not limitative of the remainder of the disclosure in any way whatsoever. The entire disclosure of all applications, patents and publications, cited above and in the figures are hereby incorporated by reference in their entirety.

TABLE 1

| Clone ID | Protein-L* | Location | Domains Names |
|---|---|---|---|
| 1. Bcd0468a | 98aa | Membrane | Signal peptide: 1-28aa |
| | | | Transmembrane domain: 20-42aa. (Partial CDS) |
| 1. Bcd0468b | 112aa | Membrane | Signal peptide: 1-29aa; (Partial CDS) |
| | | | Transmembrane: 20-42aa. |
| 1. Bcd0468c | 110aa | n/a | No domain found in the current protein databases. |
| 2. Bcu0021z | 404aa | Intracellular | Nmra domain: 118-320aa. |
| 3. Bcu0067z | 228aa | Membrane | Transmembrane: 13-35aa. |
| 4. Bcu0120 | 57aa | n/a | No domain found in the current protein databases. |
| 5. Bcu0148 | 97aa | n/a | No domain found in the current protein databases. |
| 6. Bcu0149 | 124aa | Membrane | 1. Transmembrane 7-26aa; |
| | | | 2. BCL domain: 32-64aa; |
| | | | 3. TOP2c domain: 74-113aa. |
| 7. Bcu0092 | 234aa | Membrane | 1. Transmembrane domain: 55-74aa; |
| | | | 2. Transmembrane domain: 94-116aa; |
| | | | 3. Transmembrane domain: 123-142aa; |
| | | | 4. Transmembrane domain: 152-171aa. |
| 8. Bcu0156x | 2677aa | Nuclear | 1. DEXDc3 domain: 1930-2244aa |
| | | | 2. Urdu/REP helicase domain: 1935-2210aa; |
| | | | 3. ATP/GTP-binding site motif A (P-loop): 1963-1970aa; |
| | | | 4. Nuclear localization signal: 2070-2087aa. |
| 9. Bcu0258x | 1078aa | Membrane- | 1. Myosin_head (large ATPase) domain: 17-688aa; |
| | | associated1 | 2. IQ motif: 703-725aa; |
| | | | 3. IQ motif: 726-748aa; |
| | | | 4. IQ motif: 749-771aa; |
| | | | 5. IQ motif: 778-800aa. |
| 10. Bcu0343 | 811aa | Nuclear | 1. KRAB domain: 12-72aa; |
| | | | 2. Internal repeat domain: 140-279aa; |
| | | | 3. ZnF_C2H2 domain: 328-350aa; |
| | | | 4. ZnF_C2H2 domain: 356-378aa; |
| | | | 5. ZnF_C2H2 domain: 384-406aa; |
| | | | 6. ZnF_C2H2 domain: 412-434aa; |
| | | | 7. ZnF_C2H2 domain: 440-462aa; |
| | | | 8. ZnF_C2H2 domain: 468-490aa; |
| | | | 9. ZnF_C2H2 domain: 496-518aa; |
| | | | 10. ZnF_C2H2 domain: 524-54aa; |
| | | | 11. ZnF_C2H2 domain: 552-574aa; |
| | | | 12. ZnF_C2H2 domain: 580-602aa; |
| | | | 13. ZnF_C2H2 domain: 608-630aa; |
| | | | 14. ZnF_C2H2 domain: 636-658aa; |
| | | | 15. ZnF_C2H2 domain: 664-686aa; |
| | | | 16. ZnF_C2H2 domain: 692-714aa; |
| | | | 17. ZnF_C2H2 domain: 720-742aa; |
| | | | 18. ZnF_C2H2 domain: 748-770aa; |
| | | | 19. LIM domain: 637-697aa. |
| | | | 20. ZnF_GATA domain: 688-746aa. |
| | | | 21. ZnF_BED domain: 730-773aa. |
| 11a. Bcu371Az | 199aa | Nuclear | No domain found in the current protein databases. |
| 11b. Bcu0371Bz | 237aa | Nuclear | Basic region leucine zipper (BRLZ) domain: 153-217aa |
| 12. Bcu399 | 487aa | Membrane | 1. Transmembrane domain: 49-71aa; |
| | | | 2. Transmembrane domain: 86-103aa. |
| 13. Bcu0408z | 504aa | Nuclear | 1. Coiled coil domain: 51-81aa. |
| | | | 2. Protein kinase (unclassified specificity) domain: |
| | | | 228-331aa. |
| 14. Bcu0475z | 191aa | Cytoplasm | 1. Thioredoxin-like domain: 95-176aa. |
| 15. Bcu0504 | 367aa | Cytoplasm | 1. WD40 domains: 50-89aa; |
| | | | 2. WD40 domains: 92-131aa; |
| | | | 3. WD40 domains: 135-174aa; |
| | | | 4. WD40 domains: 177-216aa; |
| | | | 5. WD40 domains: 267-310aa; |
| | | | 6. WD40 domains: 313-352aa. |
| 16. Bcu0571 | 128aa | Cytoplasm | No domain found in the current protein databases. |
| 17. Bcu0720x | 1337aa | Nuclear | No domain found in the current protein databases. |
| 18. Bcu0721z | 1179aa | Membrane | 1. Cysteine-rich repeat in FGFR: 153-212aa; |
| | | | 2. Cysteine-rich repeat in FGFR: 291-345aa; |
| | | | 3. Cysteine-rich repeat in FGFR: 349-413aa |
| | | | 4. Cysteine-rich repeat in FGFR: 417-473aa; |
| | | | 5. Cysteine-rich repeat in FGFR: 480-537aa; |
| | | | 6. Cysteine-rich repeat in FGFR: 540-604aa; |
| | | | 7. Cysteine-rich repeat in FGFR: 612-666aa; |
| | | | 8. Cysteine-rich repeat in FGFR: 670-728aa; |
| | | | 9. Cysteine-rich repeat in FGFR: 732-788aa; |
| | | | 10. Cysteine-rich repeat in FGFR: 800-854aa; |
| | | | 11. Cysteine-rich repeat in FGFR: 858-911aa; |
| | | | 12. Cysteine-rich repeat in FGFR: 915-972aa; |
| | | | 13. Cysteine-rich repeat in FGFR: 982-1042aa; |
| | | | 14. Cysteine-rich repeat in FGFR: 1046-1011aa; |
| | | | 15. Transmembrane domain: 1146-1168aa. |
| 19. Bcu0730Ax | 543aa | Cytoplasm | No domain found in the current protein databases. |
| 19. Bcu0730Bx | 516aa | Cytoplasm | No domain found in the current protein databases. |
| 19. Bcu0730Cx | 538aa | Cytoplasm | No domain found in the current protein databases. |
| 19. Bcu0730Dx | 585aa | Cytoplasm | No domain found in the current protein databases. |
| 20. Bcu770 | 463aa | Extracellular | 1. FN1 domain-1: 88-123aa; |
| | | | 2. FN1 domain-2: 133-171aa; |
| | | | 3. FN1 domain-3: 177-215aa; |
| | | | 4. FN1 domain-4: 222-261aa; |
| | | | 5. FN1 domain-5: 267-306aa; |
| | | | 6. FN1 domain-6: 344-378aa; |
| | | | 7. FN2 domain-1: 393-403aa; |
| | | | 8. FN2 domain-2: 404-417aa; |
| | | | 9. FN2 domain-3: 421-437aa; |
| | | | 10. Glycosyl hydrolase family domain-1: 118-145aa; |
| | | | 11. Glycosyl hydrolase family domain-2: 365-393aa; |
| | | | 12. EGF-like domain: 112-123aa. |
| 21. Bcu0840 | 723aa | Nuclear | TBOX domain: 102-290aa. |
| 22. Bcu0862 | 112aa | Nuclear | No domain found in the current protein databases. |
| 23. Bcu0916z | 118aa | Nuclear | No domain found in the current protein databases. |
| 24. Bcu0918-2 | 813aa | Cytoplasm | No domain found in the current protein databases. |
| 25. Bcu0947xz | 3051aa | Nuclear | 1. Proline-rich region: 5-36aa; |
| | | | 2. Coiled coil: 288-310aa; |
| | | | 3. Coiled coil: 350-374aa; |
| | | | 4. Coiled coil: 497-527aa; |
| | | | 5. Coiled coil: 554-599aa; |
| | | | 6. Coiled coil: 818-841aa; |
| | | | 7. CT domain: 1309-2187aa; |
| | | | 8. AT_hook domain: 2872-2884aa; |
| | | | 9. TT_ORF2 domain: 77-129aa. |
| 26. Bcu1034 | 264aa | Extracellular | 1. Signal peptide: 1-21aa |
| | | | 2. Thrombospondin type 1 repeats (TSP1) domain: |
| | | | 77-133aa. |
| 27. Bcu1041 | 614aa | Nuclear | 1. bZIP domain: 228-275aa. |
| 28. Bcu0610Az | 582aa | Nuclear | 1. RNA recognition motif: 126-188aa; |
| | | | 2. Lupus La protein domain: 41-59aa; |
| | | | 3. Lupus La protein domain: 67-83aa; |
| | | | 4. Lupus La protein domain: 98-112aa; |
| | | | 5. Lupus La protein domain: 165aa-184aa. |
| 28. Bcu0610Bz | 582aa | Same as Bcu0610Az. | |
| 29. Bcu0586 | 2376aa | Cytoplasm | Not found in current protein databases. |
| 30. Bcu0715Az | 791aa | Cytoplasm | 1. Calpain inhibitor domain: 177-307aa; |
| | | | 2. Calpain inhibitor domain: 312-442aa; |
| | | | 3. Calpain inhibitor domain: 447-584aa; |
| | | | 4. Calpain inhibitor domain: 590-720aa. |
| 30. Bcu0715Bz | 769aa | Cytoplasm | 1. Calpain inhibitor domain: 155-285aa; |
| | | | 2. Calpain inhibitor domain: 290-420aa; |
| | | | 3. Calpain inhibitor domain: 425-562aa; |
| | | | 4. Calpain inhibitor domain: 568-698aa. |
| 30. Bcu0715Cz | 750aa | Cytoplasm | 1. Calpain inhibitor domain: 136-266aa; |
| | | | 2. Calpain inhibitor domain: 271-401aa; |
| | | | 3. Calpain inhibitor domain: 406-543aa; |
| | | | 4. Calpain inhibitor domain: 549-679aa. |
| 31. Bcu0205Az | 2551aa | Membrane | 1. Transmembrane domain: 233-245aa; |
| | | | 2. Epidermal growth factor-like domain: 423-451aa; |
| | | | 3. Epidermal growth factor-like domain: 454-482aa; |
| | | | 4. Epidermal growth factor-like domain: 487-516aa; |
| | | | 5. Epidermal growth factor-like domain: 553-583aa; |
| | | | 6. Calcium-binding EGF-like domain: 517-548aa; |
| | | | 7. Calcium-binding EGF-like domain: 583-618aa. |
| 31. Bcu0205Bz | 2633aa | Membrane | 1. Transmembrane domain: 305-327aa; |
| | | | 2. Epidermal growth factor-like domain: 505-533aa; |
| | | | 3. Epidermal growth factor-like domain: 536-564aa; |
| | | | 4. Epidermal growth factor-like domain: 569-598aa; |
| | | | 5. Epidermal growth factor-like domain: 635-665aa; |
| | | | 6. Calcium-binding EGF-like domain: 601-630aa; |
| | | | 7. Calcium-binding EGF-like domain: 668-700aa. |
| 32. Bcu0988Az | 843aa | Nuclear | 1. RRM domain: 88-160aa (RNA recognition |
| | | | motif); |
| | | | 2. Coiled coil: 271-352aa; |
| | | | 3. Coiled coil: 355-554aa; |
| | | | 3. PWI domain (In splicing factors): 763-836aa. |
| 32. Bcu0988Bz | 779aa | Nuclear | 1. RRM domain: 88-160aa (RNA recognition motif) |
| | | | 2. Coiled coil: 271-490aa; |
| | | | 3. PWI domain (In splicing factors): 699-772aa. |
| 33. Bcu0518z | 1906aa | Nuclear | 1. S1(ribosomal protein S1-like RNA-binding) |
| | | | domain: 116-206aa; |
| | | | 2. S1 domain: 220-293aa; |
| | | | 3. S1 domain: 314-381aa; |
| | | | 4. S1 domain: 398-471aa; |
| | | | 5. S1 domain: 486-557aa; |
| | | | 6. S1 domain: 575-646aa; |
| | | | 7. S1 domain: 669-742aa; |
| | | | 8. S1 domain: 762-833aa; |
| | | | 9. S1 domain: 879-946aa; |
| | | | 10. S1 domain: 1069-1144aa; |
| | | | 11. S1 domain: 1182-1257aa; |
| | | | 12. S1 domain: 1263-1333aa; |
| | | | 13. S1 domain: 1357-1431aa; |
| | | | 14. Coiled coil domain: 1441-1480aa; |
| | | | 15. Coiled coil domain: 1601-1632aa; |
| | | | 16. HAT domain: 1635-1666aa; |
| | | | 17. HAT domain: 1668-1705aa; |
| | | | 18. HAT domain: 1707-1738aa; |
| | | | 19. HAT domain: 1740-1772aa; |
| | | | 20. HAT domain: 1774-1808aa; |
| | | | 20. HAT domain: 1774-1808aa; |
| | | | 21. HAT domain: 1810-1842aa; |
| | | | 22. HAT domain: 1844-1879aa; |
| | | | 23. TRP repeat domain: 1726-1829aa. |
| 34. Bcu0147Az | 958aa | Nuclear | 1. R3H domain: 152-229aa; |
| | | | (Single-strand nucleic acids-binding) |
| | | | 2. Proline-rich region: 606-704aa. |
| 34. Bcu0147Bz | 976aa | Nuclear | 1. R3H domain: 152-229aa; |
| | | | (Single-strand nucleic acids-binding) |
| | | | 2. Proline-rich region: 624-722aa. |

1 Associated with the cytoplasmic side of the cell membrane
L* stands for protein length in amino acids

[0261] TABLE 2

| Clone ID | Locus | Associated diseases |
|---|---|---|
| 1. Bcd0468 | 20q11.1-q11.22 | 1. Congenital dyserythropoietic anaemia type II (CDAN2) at 20q11.2. |
| 2. Bcu0021 | 16p13.3 | 1. Polycystic Kidney Disease (PKDTS) at 16.p13.3. |
| | | 2. Microphthalmia-cataract at 16p13.3. |
| 3. Bcu0067 | 5q14.1 | 1. Hyaloideoretinal degeneration of Wagner at5q13-q14. |
| 4. Bcu0120 | 3q25.1 | 1. Dandy-Walker variant malformation and hydrocephalus at 3q25.1. |
| 5. Bcu0148 | 6q21.3 | 1. Specific dystexia 2 at 6p21.3; |
| | | 2. Ankylosing spondylitis at 6p21.3; |
| | | 3. Renal glucosuria at 6p21.3; |
| | | 4. IDDM1 at 6p21.3; |
| | | 5. Atrial septal defect at 6p21.3; |
| | | 6. Hypotrichosis simplex of scalp at 6p21.3; |
| | | 7. Diffuse panbronchiolitis at 6p21.3; |
| | | 8. Immunoglobulin A deficiency susceptibility 1 at 6p21.3. |
| 6. Bcu0149 | 17q22-q23 | 1. Meckel syndrome, Type 1; MKS1 at 17q22-q23; |
| | | 1. Malignant Hyperthermia susceptibility 2; MHS2 at 17q11.2-q24; |
| 7. Bcu0092 | 7p14 | 1. Neuronal type D Charcot-Maine-Tooth Disease at 7p14. |
| 8. Bcu0156x | 9q34.3 | 1. Joubert syndrome 1 at 9q14.3; |
| | | 2. Recessive non-Friedreich spinocerebellar ataxia at 9q34; |
| | | 3. Primary autosomal recessive microcephaly 3 at 9q34; |
| | | 4. Juvenile amyotrophic lateral sclerosis 4 at 9q34; |
| | | 5. Lethal congenital contractures syndrome at 9q34. |
| 9. Bcu0258x | 2q32.3 | 1. Familial arrhythmogenic right ventricular dysplasia 4 at 2q32.1-q32.3; |
| | | 2. Wrinkly skin syndrome at 3q32. |
| 10. Bcu0343 | 10p11.1-p11.22 | 1. Thrombocytopenia at 10p11.2-p12. |
| 11. Bcu0371 | 19q13.2 | 1. Cystic fibrosis modifier 1 at 9q13.2-q13.4; |
| | | 2. OPA3 19q13.2-q13.3; |
| | | 3. Liposarcoma oncogene at 19q13.2-q13.3. |
| 12. Bcu0399 | 5q14.3 | 1. Usher syndrome type II at 5q14-q21; |
| | | 2. Hyaloideoretinal degeneration of wagner at 5q13-q14. |
| 13. Bcu0408 | 17q11.2 | 1. No disease association. |
| 14. Bcu0475z | 14q32.2 | 1. Usher syndrome type1A at 14q32; |
| | | 2. Autosomal recessive microphthalmos at 14q32; |
| | | 3. Hemifacial microsomia at 14q32; |
| | | 4. Ectopic expression of brain type of creatine kinase at 14q32. |
| 15. Bcu0504 | 9q32-q32.2 | 1. Muscular dystrophy, LIMB-Girdle type 2H at 9q31-q34.1. |
| 16. Bcu0571 | 8q24.12 | 1. Childhood absence epilepsy at 8q24; |
| | | 2. Benign adult familial myoclonic epilepsy at 8q24; |
| | | 3. Generalized idiopathic epilepsy at 8q24; |
| | | 4. Macular dystrophy-1, atypical vitelliform at 8q24; |
| | | 5. Epidermolysis bullosa simplex at 8q24; |
| | | 6. Langer-giedion syndrome at 8q24.11-q24.13; |
| | | 7. Spinocerebellar ataxia 16 at 8q22.1-q24.1. |
| 17. Bcu0720x | 4p14 | 1. Del(4)(14) cause breast and ovary cancers; |
| | | 2. Trisomy causes ovary and breast cancers; |
| | | 3. Monosomy causes breast, ovary and prostate tumors. |
| 18. Bcu0721z | 16q22.3 | 1. Aneurysmal bone cysts at 16q22; |
| | | 2. North American Indian childhood cirrhosis at 16q22; |
| | | 3. Acute myelogenous leukemia at 16q22. |
| 19. Bcu0730x | 15q21 | 1. Congenital dyserythropoietic anemia type III (CDAN3) at 15q21; |
| | | 2. Specific dystexia 1 at 15q21; |
| | | 3. Hereditary non-polyposis colorectal cancer type 7 at 15q21.1. |
| 20. Bcu0770 | 2q35 | 1. Brachydactyly, Type A1; BDA1 at 2q35-q36. |
| | | 2. Syndactyly, Type I at 2q34-q36. |
| 21. Bcu0840 | 12q24.1 | 1. Adult spinal muscular atrophy at 12q24; |
| | | 2. New England type neurogenic scapulopcroneal amyotrophy at |
| | | 12q24.1-q24.31. |
| 22. Bcu0862 | 17q12 | 1. Amplification of the c-erbB-2 locus (17q12-q21.32) causes gastric |
| | | cancer. |
| 23. Bcu0916z | 10q22.1 | 1. No genomic DNA available, therefore no data yet. |
| 24. Bcu918-2 | 4q21.3 | 1. Mucolipidosis II (I-cell disease) at 4q21-q23; |
| | | 2. Hyper-IgE Syndrome at 4q21; |
| | | 3. Mental health wellness 2 at 4p (Disease locus at D4S397). |
| 25. Bcu0947xz | 4p15.33 | 1. Autosomal dominant lewy body Parkinson disease 4 (PARK4) at |
| | | 4p15; |
| | | 2. Huntington disease-like 3 (HDL3) at 4p15.3; |
| | | 3. Susceptibility to systemic Lupus erythematosus 3 at 4p15.2-p16. |
| 26. Bcu1034 | 8q13.2 (Pr0453) | 1. Familial febrile convulsions 1; FEB1 at 8q13-q21. |
| 27. Bcu1041 | 17q21.1 | 1. Patella aplasia-hypoplasia at 17q21-q22; |
| | | 2. Familial progressive subcortical Gliosis at 17q21-q22; |
| | | 3. Pallidopontonigral degeneration at 17q21. |
| 28. Bcu0610Az | | 1. No genomic DNA available, therefore no data yet. |
| 28. Bcu0610Bz | | |
| 29. Bcu0586 | 16q13 | 1. Brooke-Spiegler syndrome at 16q12-q13. |
| 30. Bcu0715Az | 5q14.3 | 1. Hyaloideoretinal degeneration of Wagner at 5q13-q14; |
| | | 2. Trisomy and monosomy at 5q14 causes cancers in breast, ovary |
| | | and prostate. |
| 30. Bcu0715Bz | 5q14.3 | same as Bcu0715Az. |
| 30. Bcu0715Cz | 5q14.3 | same as Bcu0715Az. |
| 31. Bcu0205Az | 5q33.3 | 1. Atopic dermatitis 6 at 5q31-q33; |
| | | 2. Capillary infantile hemangioma at 5q31-q3; |
| | | 3. Asthma at 5q31-q33; |
| | | 4. Susceptibility/Resistance to Schistosoma mansoni infection at |
| | | 5q31-q33; |
| | | 5. Familial eosinophilia at 5q31-q33. |
| 31. Bcu0205Bz | 5q33.3 | same as Bcu0205Az |
| 32. Bcu0988 | 14q24.3 | 1. Leber congenital amaurosis type III at 14q24; |
| | | 2. Familial arrhythmogenic right ventricular dysplasia-1 (ARVD1) at |
| | | 14q23-q24. |
| 33. Bcu0518z | 10q24.32 | 1. Type II corneal dystrophy of bowman layer at 10q24; |
| | | 2. Infantile-onset spinocerebellar ataxia at 10q24. |
| 34. Bcu0147Az | 12q13.2 | 1. Autosomal dominant spastic paraplegia-10 at 12q13; |
| | | 2. Bothnian type palmoplantar keratoderma at 12q11-q13. |
| 34. Bcu0147z | 12q13.2 | same as Bcu0147z. |

[0262] TABLE 3

| Gene | | | |
|---|---|---|---|
| Name | SEQ ID NO | Expression | |
| BCD0468 | 1-2 (A); 3-4 (B); | DOWN | |
| | 5-6 (C) | | |
| BCU0021 | 7-8 | UP IL | |
| BCU0067 | 9-10 | UP IL | |
| BCU0120 | 11-14 | UP IL | normal expression |
| | | | restricted to breast |
| BCU0148 | 15-16 | UP IL | |
| BCU0149 | 17-18 | UP DIH | |
| BCU0092 | 19-20 | UP DL | |
| BCU0156 | 21-22 | UP DIL | normal expressed |
| | | | restricted to thymus |
| BCU0258 | 23-24 | UP DIL | |
| BCU0343 | 25-26 | UP DIM | |
| BCU0371 | 27-28 (A); 29-30 (B) | | |
| BCU0408 | 31-32 | UP DIL | |
| BCU0475 | 33-34 | UP DH | |
| BCU0504 | 35-36 | UP DIL | |
| BCU0571 | 37-38 | UP DIL | |
| BCU0720 | 39-40 | UP DIM | |
| BCU0721 | 41-42 | UP IL | |
| BCU0730 | 43-44 (A); 45-46 (B); | UP DIL | |
| | 47-48 (C); 49-50 (D) | | |
| BCU0770 | 51-52 | IH | |
| BCU0840 | 53-54 | UP DH | normal expression |
| | | | restricted to adrenal |
| | | | and prostate glands |
| BCU0862 | 55-56 | UP DH | |
| BCU0916 | 57-58 | UP DL | |
| BCU0918 | 59-60 | UP DM | |
| BCU0947 | 61-62 | UP DIL | |
| BCU1034 | 63-64 | UP DL | |
| BCU1041 | 65-66 | UP DL | |
| BCU0610 | 67-68(A); 69-70(B) | UP DIH | |
| BCU0586 | 71-72 | UP DIM | |
| BCU0715 | 73-74 (A); 75-76 (B); | UP DIM | |
| | 77-78 (C) | | |
| BCU0205 | 79-80 (A); 81-82 (B) | UP DL | |
| BCU0988 | 83-84 (A); 85-86 (B) | UP DIM | |
| BCU0518 | 87-88 | UP DIL | |
| BCU0147 | 89-90 (A); 91-92 (B) | UP IL | |

I = invasive ductal carcinoma (IDC);
D = ductal carcinoma in situ (DCIS);
L = low expression;
M = medium expression;
H = high expression

[0263] TABLE 4

| | | | |
|---|---|---|---|
| | | | Predominant Sites |
| Gene Name and SEQ ID | Regulation | Description | of Expression |

| | | | | |
|---|---|---|---|---|
| Bcu41 | (SEQ ID NO 115, 116) | Up | transmembrane Zn protease | |
| Bcu656 | (SEQ ID NO 117) | Up | noncoding RNA | |
| Bcu738 | (SEQ ID NO 118-119) | Up | ribosomal protein | |
| Bcu93 | (SEQ ID NO 120-121) | Up | ribosomal protein L23 | |
| Bcu931 | (SEQ ID NO 123-124) | Up | Ras-related GTP-binding protein | |
| Bcd215 | (SEQ ID NO 125-126) | Down | carboxypeptidase | |
| Bcu921 | (SEQ ID NO 127-128) | Up | | |
| Bcu224 | (SEQ ED NO 129-130) | Up | transmembrane BMP receptor | |
| Bcu259 | (SEQ ID NO 131-132) | Up | nuclear localizing protein | |
| Bcu616 | (SEQ ID NO 133-134) | Up | | |
| Bcu631 | (SEQ ID NO 135-136) | Up | | |
| Bcu1040 | (SEQ ID NO 137-138) | Up | | |
| Bcu924 | (SEQ ID NO 139-140) | Up | | |
| BCD0332 | (SEQ ID NO 141-142) | Up | slow voltage-gated potassium channel, 2-123 | |
| | | transmembrane domain, 47-69 | | |
| BCU0627 | (SEQ ED NO 143-144) | Up | signal peptide, 1-20 | colon, muscle |
| | | transmembrane domain, 21-40 | | |
| | | peptidase family M13, 538-748 | | |
| BCD0269 | (SEQ ID NO 145-146) | Up | transmembrane domain, 45-67 | adrenal, heart, |
| | | transmembrane domain, 80-102 | lung | |
| BCU0724 | (SEQ ID NO 147-148) | Up | transmembrane domain, 62-84 | pancreas, heart, |
| | | transmembrane domain, 91-108 | liver, breast, | |
| | | transmembrane domain, 113-135 | pancreas | |

1. An isolated polynucleotide comprising a polynucleotide sequence which codes without interruption for a human differentially-regulated breast cancer polynucleotide having an amino acid sequence set forth in SEQ ID NOS 2, 4, 6, 8, 10, 12, 16, 18, 20, 22, 24, 26, 28, 30, 32, 34, 36, 38, 40, 42, 44, 46, 48, 50, 52, 54, 56, 58, 60, 62, 64, 66, 68, 70, 72, 74, 76, 78, 80, 82, 84, 86, 88, 90, 92, 116, 119, 121, 124, 126, 128, 130, 132, 134, 136, 138, 140, 142, 144, 146, or 148, or a complement thereto.

2. An isolated polynucleotide of claim 1 having a polynucleotide sequence set forth in selected from SEQ ID NOS 1, 3, 5, 7, 9, 11, 13, 15, 17, 19, 21, 23, 25, 27, 29, 31, 33, 35, 37, 39, 41, 43, 45, 47, 49, 51, 53, 55, 57, 59, 61, 63, 65, 67, 69, 71, 73, 75, 77, 79, 81, 83, 85, 87, 89, 91, 115, 117, 118, 120, 123, 125, 127, 129, 131, 133, 135, 137, 139, 141, 143, 145, or 147.

3. An isolated polynucleotide comprising, a polynucleotide coding sequence for a human differentially-regulated breast cancer gene having 95% or more nucleotide sequence identity along its entire length to a polynucleotide sequence set forth in SEQ ID NO 1, 3, 5, 7, 9, 11, 13, 15, 17, 19, 21, 23, 25, 27, 29, 31, 33, 35, 37, 39, 41, 43, 45, 47, 49, 51, 53, 55, 57, 59, 61, 63, 65, 67, 69, 71, 73, 75, 77, 79, 81, 83, 85, 87, 89, 91, 115, 117, 118, 120, 123, 125, 127, 129, 131, 133, 135, 137, 139, 141, 143, 145, or 147, and which codes without interruption for said coding sequence, or a complement thereto.

4. An isolated polynucleotide which is specific for a human differentially-regulated breast cancer gene of claim 1 and having a nucleotide sequence selected from: SEQ ID NO 1, 3, 5, 7, 9, 11, 13, 15, 17, 19, 21, 23, 25, 27, 29, 31, 33, 35, 37, 39, 41, 43, 45, 47, 49, 51, 53, 55, 57, 59, 61, 63, 65, 67, 69, 71, 73, 75, 77, 79, 81, 83, 85, 87, 89, 91, 115, 117, 118, 120, 123, 125, 127, 129, 131, 133, 135, 137, 139, 141, 143, 145, or 147, or a complement thereto.

5. An isolated polynucleotide of claim 4, wherein said fragment is effective in a polymerase chain reaction.

6. An isolated polypeptide of claim 1 which is differentially-regulated in breast cancer having an amino acid sequence set forth in SEQ ID NOS 2, 4, 6, 8, 10, 12, 16, 18, 20, 22, 24, 26, 28, 30, 32, 34, 36, 38, 40, 42, 44, 46, 48, 50, 52, 54, 56, 58, 60, 62, 64, 66, 68, 70, 72, 74, 76, 78, 80, 82, 84, 86, 88, 90, 92, 116, 119, 121, 124, 126, 128, 130, 132, 134, 136, 138, 140, 142, 144, 146, or 148.

7. An isolated polypeptide which is a human differentially-regulated breast cancer gene having 95% or more amino acid sequence identity along its entire length to an amino acid sequence selected from SEQ ID NOS 2, 4, 6, 8, 10, 12, 16, 18, 20, 22, 24, 26, 28, 30, 32, 34, 36, 38, 40, 42, 44, 46, 48, 50, 52, 54, 56, 58, 60, 62, 64, 66, 68, 70, 72, 74, 76, 78, 80, 82, 84, 86, 88, 90, 92, 116, 119, 121, 124, 126, 128, 130, 132, 134, 136, 138, 140, 142, 144, 146, or 148.

8. A method of detecting a nucleic acid for a human differentially-regulated breast cancer gene, comprising,
contacting a sample comprising nucleic acid with a polynucleotide probe specific for a human differentially-regulated breast cancer gene of claim 1 under conditions effective for said probe to hybridize specifically with a nucleic acid for said gene, and
detecting hybridization between said probe and said nucleic acid.

9. A method of claim 8, wherein said detecting is performed by:
Northern blot analysis, polymerase chain reaction (PCR), reverse transcriptase PCR, RACE PCR, or in situ hybridization.

10. A method of treating a breast cancer showing elevated expression of a human differentially-regulated breast cancer gene, comprising:
administering to a subject in need thereof a therapeutic agent which is effective for regulating expression of a human differentially-regulated breast cancer gene polynucleotide, or polypeptide encoded thereby, of claim 1.

11. A method for identifying an agent that modulates the expression of a human differentially-regulated breast cancer gene in cells expressing said gene, or the biological activity of a polypeptide encoded thereby, comprising,
contacting a cell with a test agent under conditions effective for said test agent to modulate the expression of a human gene of claim 2, or the biological activity of a polypeptide encoded thereby, in said cell, and
determining whether said test agent modulates said gene or polypeptide.

12. A method of claim 11, wherein said agent is a binding-partner that specifically recognizes said polypeptide.

13. A method of detecting polymorphisms in a human differentially-regulated breast cancer gene, comprising,
comparing the structure of: genomic DNA comprising all or part of a human differentially-regulated breast cancer gene, mRNA comprising all or part of a human differentially-regulated breast cancer gene, cDNA comprising all or part of a human differentially-regulated breast cancer gene, or a polypeptide comprising all or part of a human differentially-regulated breast cancer gene, with the complete structure of a human differentially-regulated breast cancer gene of claim 2.

14. A method of claim 13, wherein said polymorphism is a nucleotide deletion, substitution, inversion, or transposition.

15. A mammalian cell whose genome comprises a functional disruption of a differentially-regulated breast cancer gene homolog of claim 1 within a nucleotide sequence which is specific for said gene.

16. A non-human, transgenic mammal comprising a cell of claim 15, said mammal being susceptible to breast cancer.

17. An antibody which is specific-for a polypeptide sequence which is specific for a human differentially-regulated breast cancer gene of claim 1.

18. A method of selecting a human differentially-regulated breast cancer gene polynucleotide or amino acid sequence from a database, comprising:
displaying, in a computer-readable medium, a polynucleotide sequence or polypeptide sequence for a human differentially-regulated breast cancer gene of claim 2, or complements to the polynucleotides sequence,
wherein said displayed sequences have been retrieved from said database upon selection by a user.

The application's sequence listing, which the Patent Office published only in electronic form, follows.

SEQUENCE LISTING (148 sequences)

SEQ ID NO: 1 - DNA, 2624 bp, Homo sapiens
  CDS (1)..(297)
agctcatctctgccgtgctgcagggaaccctatttccttcccctgcagctcagccacctcctcctctcaggtctgccagccatgaaacttctttacctgtttcttgccatccttctggccatagaagaaccagtgatatcaggtaacgtgagcctctctcgggggtctgggttcctggtcatgggcttcccgtctttcccttccctctcactgtgggcatcatctgaagcctttccttctctcctgcagcttcgggaggtttgcccaggatcatctcaagttaatatctctctctgattcttttttgccagagtggtgggatgatagatgtttggagcatctggtgcttgagggccagggtggtatcctggtgggagcttgggagaggtttgaggggcaaagcgtgggtgcaggttggggacttgttgaggacttcgggagactagagtggaagctggggtgagttgtgatgtggaggaaaaaccttgggattggagtgatagaaggaatattaggatgagctggaggtgaggagctgggcttccctgatggtttagggcagagttggagacaggatgggatttggggttgagtggagctggtgttgaggattaggctggggcttgggctgaggctgggagtcggtgctggatgctgcagggtgattgggttcagcttggtcatggcatactgctgggaattgaggttagtgacttgattagattagggttagattagattagattagggtttggcttggagttggggcttgggggcattgagttgagtaaggctgggagttctaattaaggcaggcctgaatgagtttgagtttgaattgggttaatatagggtcaaggaagattgcagattgggatgcggctggagctgaggcttgttgggcttatgtgaaatagggtcaggttattgataagaaacagggtctgtgtaatgtgagtgaatcctcttcgttccctaatattacaggtgatcatgtccttttcccttcatccctagctctgctaggtgggacattaattagcttcagttgattccaaagtaaggagtaggaagttgggggataggaagacagaagggtgagaagtccaaaaaaggctctcccaaaaacttcggagctctcagttggaaccattgtctcagttctcttccctctcaaggtctcttctctcttttcctgggactgggtctggtattactcactcagctggctttcttctcttcttccctgtcctcctgttcctcctctgccttgtcttttctctccgcttgagggatactaacatctgcttaattgttgttcatatgccccaaagtagagtgttggatggatggacactgccggttgttgtgcaaagatggtgaagacagcatcatacgctgccgaaatcgtaaacggtgctgtgttcctagtcgttatttaacaatccaaccagtaacaattcatggaatccttggctggaccactcctcagatgtccacaacagctccaaaaatgaagacaaatataactaatagatagaaatgactttgtttcaggttgcttagggtccacatttcattaaaactcacaaatttgtttctggtgtctgtcaatcataaggaatgatacttcaaatggattgagggtggggggatggcagggggaggtgaagagctagtcgagagaagtcactagggctgggtcatagcgatggtgtgatcattacagtcttgaagatgattccccatctaccagctgcaggagaggctattgagtcaggagtggactggggagaacatggtgggagctgagagatttaaaggcatagcagatgcctaaagagtgggagaatccttaggctgggagagttggtccatcttgagagtgaatgggctgagagtggatggggctgaatataacccaaatccttggggttctagagaaaccagctgatgctttctagtgctcaagaggcccagccccaggggttagaaggtgtctaagtactaaaaaaagataaagcacatgatttgcttatttatatatgaatttgttcattattcattttttccattctttcaccgattcattcattcatattcacttcagctctgccacttactactggcagactctgcatataaacctctcagaacttcatcttcctcctctgtaaattagagtaattgtagaatctatttcaggattgcagtaaggatgaaatgacataataatgcaaagctctggtgaggacagtgggatgctgcctggatactgccaggcaaacgccacatccttcgatgcatgggtaacagtggaatttgtagggcctcttgcaaaaagaacgaacagccctacctctattgcagaaattgtcagtcctgctgcctccagtcctacatgaggataagcatttctggcaaagaggaaaataccgactggtcttatgagaagcagtggccaagactaccttgagtgctggtgattaccattctcaagctctctgggcgcagagacctgctgtcaacccccctcattaaaattcatgtgcctgctaaaaaaaaaaaaaaaaaaaaaaaaaaaaaaaaaaaaaaaaaaaaaaaaaaaaaaaaaaaaaaaaaaa

SEQ ID NO: 2 - protein, 98 aa, Homo sapiens
SSSLPCCREPYFLPLQLSHLLLSGLPAMKLLYLFLAILLAIEEPVISGNVSLSRGSGFLVMGFPSFPSLSLWASSEAFPSLLQLREVCPGSSQVNISL

SEQ ID NO: 3 - DNA, 429 bp, Homo sapiens
  CDS (3)..(341)
agcaaagctcatctctgccgtgctgcagggaaccctatttccttcccctgcagctcagccacctcctcctctcaggtctgccagccatgaaacttctttacctgtttcttgccatccttctggccatagaagaaccagtgatatcaggcaaacgccacatccttcgatgcatgggtaacagtggaatttgtagggcctcttgcaaaaagaacgaacagccctacctctattgcagaaattgtcagtcctgctgcctccagtcctacatgaggataagcatttctggcaaagaggaaaataccgactggtcttatgagaagcagtggccaagactaccttgagtgctggtgattaccattctcaagctctctgggcgcagagacctgctgtcaacccccctcattaaaattcatgtgcctgctaaaaaaa

SEQ ID NO: 4 - protein, 112 aa, Homo sapiens
QSSSLPCCREPYFLPLQLSHLLLSGLPAMKLLYLFLAILLAIEEPVISGKRHILRCMGNSGICRASCKKNEQPYLYCRNCQSCCLQSYMRISISGKEENTDWSYEKQWPRLP

SEQ ID NO: 5 - DNA, 503 bp, Homo sapiens
  CDS (3)..(335)
agcggcccgcagccctgctgataaaagcaaagctcatctctgccgtgctgcagggaaccctatttccttcccctgcagctcagccacctcctcctctcaggtctgccagccatgaaacttctttacctgtttcttgccatccttctggccatagaagaaccagtgatatcagctctggtgaggacagtgggatgctgcctggatactgccaggcaaacgccacatccttcgatgcatgggtaacagtggaatttgtagggcctcttgcaaaaagaacgaacagccctacctctattgcagaaattgtcagtcctgctgcctccagtcctacatgaggataagcatttctggcaaagaggaaaataccgactggtcttatgagaagcagtggccaagactaccttgagtgctggtgattaccattctcaagctctctgggcgcagagacctgctgtcaacccccctcattaaaattcatgtgcctgctaaaaaaaaaaaaaaaa

SEQ ID NO: 6 - protein, 110 aa, Homo sapiens
RPAALLIKAKLISAVLQGTLFPSPAAQPPPPLRSASHETSLPVSCHPSGHRRTSDISSGEDSGMLPGYCQANATSFDAWVTVEFVGPLAKRTNSPTSIAEIVSPAASSPT

SEQ ID NO: 7 - DNA, 1422 bp, Homo sapiens
  CDS (66)..(1280)
ttttttaagactcatggacatagctttaattatctttgcctgacgcccaatacctgaaaattaagatgttcatgcaagataaagaggtaatttttctcctcctcccagtcatcacccgtagcatccggttaagaggctctccacctcgctcattttggtctaactggatttacacaaactcactgtgcacgtgcctggggcgggcaaacccggaaacgacgccgagtcccgcgggatccaggaggagccaactgcgccggaggaggggtttcggccgacacgtcgggattggcggctgcagccagggtcctccgacgctgggcttccgtgagcggcgctctgccagatctctggaccggattcgtcccattctcgtcctcatggtggacaagaaactggtggtggttttcggaggcacaggtgcccagggtggctccgtggcccgcacactcctggaagatgggacattcaaggttcgagtggtgacccgaaaccctaggaagaaggcagcaaaggagctgaggctgcaaggtgcagaagtagtgcagggagaccaagatgaccaggtcatcatggagctggccctgaatggggcttacgccaccttcatcgtgaccaattactgggagagctgcagccaggagcaggaggtcaagcaggggaagctgctcgctgatctggccaggcgcctgggcctccactatgtggtctacagcggcctggagaacatcaagaagctgacggcagggagattggccgccgcgcactttgacggcaaaggggaggtggaggaatatttccgggacattggcgttcccatgaccagtgtgcggctgccctgctattttgagaacctcctctcccacttcttgccccagaaagccccagacggaaagagctacttgctgagcttgcccacaggtgacgttcccatggatggcatgtccgtgtctgacctgggtcctgtggtgctcagccttttgaagatgccagaaaaatacgtcggccagaacatcgggctgagcacttgcaggcacacggccgaggagtacgctgccctgctcaccaagcacacccgcaaggtcgtgcacgatgccaagatgactcctgaggactacgaaaagcttggctttcccggtgcccgggacctggccaacatgttccgtttctatgccctgagacccgaccgtgacatcgagctgaccctgagactcaaccccaaggccctgacgctggaccagtggctggaacagcacaaaggggacttcaacctgctgtgacctgcccgcctcgcggccccttgtggggatcgggggcaccagaggggcagaggcaccaacatctgaataaagccattgttctcccaaaaaaaaaaaaaaaaaaaaaaaaaaaaaaaaaaaaaaaaaaaaaaaaaaaaaaaaa

SEQ ID NO: 8 - protein, 404 aa, Homo sapiens
MFMQDKEVIFLLLPVITRSIRLRGSPPRSFWSNWIYTNSLCTCLGRANPETTPSPAGSRRSQLRRRRGFGRHVGIGGCSQGPPTLGFRERRSARSLDRIRPILVLMVDKKLVVVFGGTGAQGGSVARTLLEDGTFKVRVVTRNPRKKAAKELRLQGAEVVQGDQDDQVIMELALNGAYATFIVTNYWESCSQEQEVKQGKLLADLARRLGLHYVVYSGLENIKKLTAGRLAAAHFDGKGEVEEYFRDIGVPMTSVRLPCYFENLLSHFLPQKAPDGKSYLLSLPTGDVPMDGMSVSDLGPVVLSLLKMPEKYVGQNIGLSTCRHTAEEYAALLTKHTRKVVHDAKMTPEDYEKLGFPGARDLANMFRFYALRPDRDIELTLRLNPKALTLDQWLEQHKGDFNLL

SEQ ID NO: 9 - DNA, 4909 bp, Homo sapiens
  CDS (540)..(1226)
ctctcccctcccttgcgttgcccccctctcccgccgcctcctcccgctctcctctcgctctcctcccgcctccttcttccaggcgcggccagcgggggcaagagcgaggtggctgcgaggaggcgtcactgaaagccctgacttggggaaggctgcgggctcggagccggagacgccgagctggggccgggtgagttgggaatcagactcttgagttgacagctggcctatggtttctgcattttgttaagaagcacctcatgcaagcgagggacctgggactgctcacagccaggtggcatttttctgaagttgttcattaagacttcccagcattcctacagatataaataggtgaggccgcaggcggtgctctgggtccgggagcgctgtccccagcatgaacgcggccggcggcgggagtgaatgactgcagctgcgacttccttcccgggccgcccgagcctccttccccaccgactttcttgttttgattaactccgtggactcctgactctttcttcgcccggaacatcaatatgtgtcatgtcattgtcacctgtcgctcgatgctctggaccttgctgagtattgtggtggcttttgccgagctcattgccttcatgagtgcagactggctgatcgggaaagcgaggagccgcggcggcgtggagccggcgggcccgggcgggggctccccggagccctaccaccccaccctgggcatctacgcccgctgcatccggaacccaggggtgcagcacttccagcgggacacgctgtgcgggccctacgccgagagcttcggcgagatcgccagcggcttctggcaggccacagctattttcctggctgtgggaatctttattctctgcatggtggccttggtgtccgtcttcaccatgtgtgtacagagcatcatgaagaaaagcatcttcaatgtctgtgggctgttgcaaggaattgcaggtctattccttatcctcggtttgatactctaccctgctggctggggttgccagaaggccatagactactgtggacattatgcatctgcctacaaacctggagactgctccttgggctgggccttttataccgccattgggggcacagtcctcactttcatctgtgctgtcttctctgcacaagcagaaattgcaacctctagtgacaaagtacaggaagaaattgaagaggggaaaaatctgatctgcctcctttagtttggaagagacaatgccattttctcccttgagtaatcttgtgaaacagtccacagtttcatcatttgagtcaagtggagaactaacctttacctaccaaagccacgttccacggcccgaggcttaaacaggaccaatgagaggccacatccagctacgcaaagttactggacatgcggtctgcagtgcacattataaggaatggaacatgaaaatagtatataatcctagacctggagttgccaagttctgtcagactccatctcccccaggttcaatgaaggataataatctaaatcattagggcagcagtttctctggtaacggaagagaccgtccgccagatctgcaggctgtttctgctccaacactgcttgcttgtgagcatctctgcctcagaatggggttttgggttggagttcttgttttcctctgttctttcaagttgtctccaacgaacagaaaactataaacttactggggacaggatgtgtgctaaagggcacagcaagacactgtcttttgcttagctgaccaaaggggtcagcagggatggcgtggagtcatgctgtggaacttattctaggctgaatcctagggtaaggtggatcaactgaactgtcactccagagattttagaaatttgagtaaagaaacaataaggacctatacaatcatatgagaacaaaaatatgaaatcttgctagtgaagacgtattttttcttcttcccagcagccaggctagcaccagttctggcccagtctcctcttcttctggagatcacatgtttttcttctaaggttaggattgtgctttgactgcgaaaggaaacctcactgtttcctccttccagggactgaggtctccaagctagctgtggcttatgcagatgttcactgggaggacctgccagaatctcggcacttggggggagacctttactcccagtttggtgaccatgctgtagtcagctctatttccaatcccgacagtagcagaatggcattctacaacaaaaagaagctagttatgggagttaagtttttgtagttactggtgttgatcctgaaagcagactgagataacattaaattgctgcaactgaagaactgcagccaagaccttaattccaggaaagcacagaggacaaagttaattcaaaaagaggcgctagatcaaggtcacagcactgcctacacctgtttacaaaaagaatcaaataccactatgaataaggattcaggggtttttaatctactttccataaattaccaatatcactgattcaggaagatagtatctcagaatgaccagagcagcacagaaacaagctactctgacattatgggagcttcaaaattgtatcatgatacagaaacactccttagcactttaagaaagtgagatggaactgccagatttctggaaggagaaaaagtgtaggtatttgggttcattaatctgctcacttgaggactttgttttgaaaaagtaccttctgtggacaaggtattgtgctaccagctatacaaccctgacttcagagtttgcaaccttgccctgagtgaatcatgttaaagctgtctgagtctaaagcaccgtatcttggtgcagaacagataattatacagagatggaatgggacaaccgcagttttactacattctggtgtttggcctatatgagaaaccatcttctcacagattaagggctaagggcaaaaggggtgggaggtgtggaactagccttaatgagtttcccattcctgaaccaaaattcaaagtgagtgagatgtaaatcctgtgattttggtgaagaaaaaaacgggtatcttcatagcagcctaggaaaccttaaccatatctctaacaccacacagaaagaggctggaggagccactggacaaagcttctgtctctgtgtgtacatttataatgttctaaccaagtctcaaaccttgatgaaaaacacaaaatttttccataaacttatcagaagactcacttttctttctttcttggatagagaaaccattttctgacactaggtttacaatctcagtgtccttacaagttaagtcctaagctcacaggatcctccgagcatgtccatcacctgctctttggctaaggtggcagtgtacctctagatcaacctgggaacagtcacaagggagtgtgacttcttggccataataaactcactcgatagtgtttatgttattaatctgaatgcaacagaagacaaaagcacaggcatgcacacacacagaaccccaaaccactaaaaactacctaaacactgacttagtaaatagtaaaaaggtaatgttgggacttttaaaccttgaatccattagccaggcttgggatgaaaggaccatctaaaatcatgctagtctaaaccatgctcttccacacagctgtttaaaaaccactgggtatgaggaatatgctagaaagaaatgttaaaaatagattgttggctcacacttatttttctaataaataggaccattattactaccaggaaagtcttatttattttgcctgaaattggcttaaagaaagtctcatgacgggatgggatgggctgcgcttctcaatgaactctgaggcagaaatatttgccttggattctgtggattctttaaacctgtgtgctaataattcaaacaatgttgcattaattgtataagggtttttgtatagttttcaaacatctgtggtgtaatgatctttgttaaacatatattctgtaaagtgccatagtctttttttatgtgtagcatatttaaaaatatatatgtatattatacatacacaagtttgtgtgaaagatgtgcaataacaaaggtgtatgtatgttttgttgttttgttttggaaactggacaggagtcaaaacagggatgtttgtttctgttttggcaaggagagttccacatttttgccttcatggcttattcagtaacccataattttaatgctacacaaatcttatgtgaagaaaagactggtatgaaatcattttttcctgggtctaaaataatcgctagtgttatgtcaaagttaagcccgcacgccaggcccagttaatgctagtctttcatgtgaaatgtgaagctgccatgttgccttttctcttagtaggataactagtagctggtacataatcactgaggagctatttcttaacatgcttttatagaccatgctaatgctagaccagtatttaagggctaatctcacacctccttagctgtaagagtctggcttagaacagacctctctgtgcaataacttgtggccactggaaatccctgggccggcatttgtattggggttgcaatgactcccaagggccaaaagagttaaaggcacgactgggatttcttctgagactgtggtgaaactccttccaaggctgagggggtcagtaggtgctctggagggactcggcaccacttgatattcaacagccacttgagccaaatataaaattgtatttacagctgatggactcaatttgagccttcaaacttgtagttatcctattatattgtaaactaatacattgtctagcattgatttggttcctgtgcatatgtattttcactatgtgctcccctccccagatcttaattaaaccagattttgcaattcaaaaaaaaaaaaaaaaa

SEQ ID NO: 10 - protein, 228 aa, Homo sapiens
MCHVIVTCRSMLWTLLSIVVAFAELIAFMSADWLIGKARSRGGVEPAGPGGGSPEPYHPTLGIYARCIRNPGVQHFQRDTLCGPYAESFGEIASGFWQATAIFLAVGIFILCMVALVSVFTMCVQSIMKKSIFNVCGLLQGIAGLFLILGLILYPAGWGCQKAIDYCGHYASAYKPGDCSLGWAFYTAIGGTVLTFICAVFSAQAEIATSSDKVQEEIEEGKNLICLL

SEQ ID NO: 11 - DNA, 636 bp, Homo sapiens
  CDS (85)..(258)
gctttccacaccgcggaagctttgttcttttgctctttgcaataaatcttgctgctgctcactctttgggtccacactgcctttatgagctgtaacaccgcgaaggtccacagcttcactcctgagccagcgagaccacgaaccccaccagaaggaagaatctgtgaacacatccgaacatcagaaggaacaaactctagacatgccgcctttaagaactgcaacactcactgcgagtgtccgcggcttcattcttgaagtcagtgagacgaagaacccaccaattccagacacattttggcgacctagatgggacaatcgcctatcaccgagtggtgagaccatcgcctatagctgagcggcgagacaatcacctatcgccaagcaacaagcagatgaatggtgaaacgatacagcagagaaagagagaagaggaacatttgaacgccgagaggagttcagccgagggtggtcggagaggtttggccacccagcaggaagattatcttcccgtgccatccccgcttccagctctgcatccatccttcagagaaccacctccaccactcaataaaaccctgcattcaaccttcaaaaaaaaaaaaaaaaaaaaaaaaaaaaaaaaaaaaaaaaaaa

SEQ ID NO: 12 - protein, 57 aa, Homo sapiens
MSCNTAKVHSFTPEPARPRTPPEGRICEHIRTSEGTNSRHAAFKNCNTHCECPRLHS

SEQ ID NO: 13 - DNA, 3228 bp, Homo sapiens
  CDS (103)..(276)
gtggcaacctgcttgggtccctttcccaccgtggaagctttgttcttttgctctttgcaataaatcttgctgctgctcactctttgggtccacactgcctttatgagctgtaacactgcgaaggtccacagcttcactcctgagccagcgagaccacgaaccccaccagaaggaagaatctgtgaacacatccgaacatcagaaggaacaaactctagacatgccgcctttaagaactgcaacactcactgcgagtgtccgcggcttcattcttgaagtcagtgagacgaagaacccaccaattccagacacattttggcgacctagatgggacaatcgcctatcactgagtggtgagaccatcgcctatagctgagcggcgagacaatcacctatcgccaagcagtgagtaccatcggacccctttcgcttgctattctgtcctgtctttgcttagagttcgggggctaaatactgggcacctgtcggccagttaaaagtgactagcgcggctgccggactaaagacaagggtgtcaggctttttgggaaagggctttctaacaactcccgactcttcggtgttgagaccattggtttgcctagaaccagcttttgcttttcctgtacttctgggctgagccgagggtcaacagagaggaaagccatgcacctccggggtcccgacaacaagttggttgaccctgcgaccatgagcggaactctcaaaggcatgtcgcccaagcgagactcgcccatctatcctatctatcctgagccttgccccctggttcctaatgcctgccagacaaacttcctctctcctctcttctctgagtttagtcccgcttctaaaaattgctacctgtctctggtgcttttctagtttctcctataagaatgatttctagtatagactccggacacactgcctttaagaactgtaacactcaccacgagggtccgcggcttcattcttgaagtcggtgagaccaagaacccaccaattccggacacaatggaatcatagtgggtcaaagttaggttttcttaatgtcttctgttactgcgtgcgatggcacaactggttgggccagattaccgatctgagtggtgtccactgatccatcaagtgcactgatcttaggttttacaatagtgatgttatccccaggagcaatttggtgaggtttagactcttggagagggaggctgcattatccctaaactgttatttccaatctcgtagctaattggttagtcctagaaaggcagactggaccccaggtaagaagtggggtctttttgggaaagggctgttaccaattttgtttcagagtcaaaccttgagctgaattccttcccaaagttagctcggcctacgcccaggaatgaacaaggacagcttagaggttatgagcaagatggagccagttagggcaaatcttttttcagtgtcttagttataattttgcaatggtggtttcacaactttaaatcatgactatcatagttttcataaataatctaggtaaacaattaaaataaaataattaggtaaatgtaatgggataaatacttgtagacaaactggtcataatttagaatataaagttaaattaaataatagatattttactatttgggcattttccaataaatatatattgtaggaaaacattcttgctaaaaaaaagtgtgtctttaaaaaaaaggtgaacaagtttcgtctaattcaaagcttaaaggttatgtgtaaaacaaggtaaaaggaaccaggaaacaaaaaaagatgcatagaaagttataaaaataaaagagtttttttaggtaaagaagctgaaagaaaagtaattttaggtaagaaagaatcctgcatggtaaatatagtcctaaaataaaataactggttgtttaaaaagaatgttgagaacaaattagaaagtctgaccatgtcatgagcggtcagtataagtcacaataagaggagatatatatatatatatacacacacacatatatacatatcttttatatcatcaggttgtcatattattattgttttggtttgcttagaaatatatatatatatataaaccttgggcacttgtcaggacttcctgaggctgtgtcatgggcgtgtcctcaacgttggcaaaataaactttctgaattaactgagacatgtcttaaattttgggagttcacaagggaaacaagggtaagaattaaacttcactaatatttctcaccctccaaagccacttcaaccactgcctttctcatttcggttaatagcaactccaatcttccagcagtttaggctgcaaaaccttagctcctctctgtcttacacttcacatccaatctgtcacctattcaaagtatcccccaaatcgagcaatttctcaccatctcttactaatacacctcaggtccaaaccaccagtatacctccctagagtactccaatagtctcctaagtagctttcttgcttctatctcccttcagtttattcttaacaaagcagcctgagtggccctttaaaaatataaatccaatcaggtaattcctctgctcattgccttacaatgggccatattttgatatggacaggagacagggaaatactggatagaagagggcagttccctggcaaaggccccaccctcaagcttggagacccatggccttaaatgggaacagccatttctgttttcgcaccccaaaagttgccttttatcctgccatgctcccctatcctgtacccatataaaccccaaacctcgggctccagaagcagatgagcagatgaggagacgcctctattccgtgtcgtttagaatgagcaaacagttgtcttcaccatcccagacaagcagatgaatggtgaaacgatacagcagagaaagagagaagaggaacatttgaacgccgagaggagttcagccgagggtggtcggagaggtttggccacccagcaggaagattatcttcccgtgccatccccgcttccagctctgcatccatccttcagagaaccacctccaccactcaataaaaccctgcattcaaccttcaaaaaaaaaaaaaaaaaaattcttccaggatgctgggcaagagcttgggatacwaaaagtggtcacattggccctctgcccttgtgaaaaggcagagtgtccattgagccgattaacattcaagccatccactgacagcagggctaaa

SEQ ID NO: 14 - protein, 57 aa, Homo sapiens; identical to SEQ ID NO: 12

SEQ ID NO: 15 - DNA, 2079 bp, Homo sapiens
  CDS (370)..(663)
attttgaggtaagaggacactctagctttttgaattgccagagttcttgcactgattttttctcttctggtagggttagtgttccattaactgtagtgtatgttgagtataggcaattggttttgtttctggatgctttcaaagtgccagggctttctctgtccaggatttttatgtatgagtaattcttgtgtttggtttcacaggttatgtatatgtagcaggataaattttgatgttgtagtttgggatgtgatccaatgcatggtgcttaagagtaatggccagtggctagcctaatacccagtggcatggctgttttatacttccttttgtttgcaggtgtgctctatagtgggggtgggagagatgcctctatcaccagatctgctcctgggccctgggggagtctcctgcaatcactgtgtttcttgtgttaggtgttctaggccacaggtctctctcaggcagaggccatttcctaggagccattctggggaactagctgtagtgtttgggttccctgcacaggcttcctccctcttcaactcagcttcattgctgcctctccatccactcagcattttctctctcaagatctgcctaaattacggtggtttactccataatttggtatctgtcagtgggggtggtgcttcctgaccatgtcaaattgaccatctattgtcgcagaatgaaaacctctttgatagactttgtaacatttttgaatattacattcaggagtaaaatcttacgcagtgtgatcccagctatctcttcacttttgagaatagccttaagtaattaaaggataattaaatatgtaattaaaaattgaaaaatagaacagctacacttccagatcccaacttctttcagaaaattttaaaatctctttaaagaaacgtaaattgagaccaaaatagactaatagctttataaaaataagtgctcaaggagggtgttacatgtgaaaattaaacttggaatttgtctttttacccgtaaaattactgagagtaatttccttgaaatggaaataactttacaaatttttaattaacaaaaatgctaaaatattactccgcttacctttatgtaacctcttccttgaaaacaacaatttactcatctggtgtgtgactctaataaccttcaatcattctctacatctgacaccatgactagtaacttagatctttaactaagcaacctttctttccgcctttgtgatattatatctagtaatttaataacaatctatgttgcaaattaaacttccaaattgaatactaattttcaaatcccaaggacccatttctcctgcctcagcatcccgagtacaggcactacaggcacatgaacaagagaagctgacagattcaaatgttcacaaacatttctgttccattttgatagatacataaactatatttctcattcttatatactttatattagggcatgagattaaagtcaaaatagtggaaaattagtagaaataacatattttatatccaatttagtctccaaaatcccaacatgtactcttctatatacatttttcagtatgcttgactggaatggccaattctacagtagtcttggaagcaacatactgcagattaaataccttagtagcctatgttcttgaatgtggacataaaggagcaatgcttttcctatcttaaaaaaaacagtttatatgaatgaaacttctgttctgtttaagatattatatgttgttgagtgtagttgtcaaagcaactagcactattccaagtaatatagaaatcatcagcttgagttgggtctgccataacagcacctaaaacatatccactaaattagtattaaatggacaagtaaaccaaactcagagggttgaaatgaagacttgtaatacccagtgaaaaaaaattattgaaactaccatctaaaattaattggaagcttaatattaactcaaggaaagagtgtgggaaatgaggaaaggcaaaaggtaatgtgttcatgtttgttctgttccataatctaagaaatagataaacacaggcaaaaaaaaaaaaaaaaaaa

SEQ ID NO: 16 - protein, 97 aa, Homo sapiens
MPLSPDLLLGPGGVSCNHCVSCVRCSRPQVSLRQRPFPRSHSGELAVVFGFPAQASSLFNSASLLPLHPLSIFSLKICLNYGGLLHNLVSVSGGGAS

SEQ ID NO: 17 - DNA, 4292 bp, Homo sapiens
  CDS (956)..(1330)
gagagagagagagagagagagagagagagagagagagagagagagagagagagagagagagagagagagagagagagagagagagagagagagagagagacagagagaactagtctcgagttttttttttttttttttttttaactaaaaaggggtcacagaatttcagcagttctctgatttttatattttattcctcttcctatccaatccctgccttttgagtccaggtggtaagtacattttctttaacgtttttcctgcttttcttcccaaatgtgtctttttctttgggctactgtaccctgcttccagtgctgtccccggcataggtccatctctgcagaagccatttcaggagtacctggaggctcaacggcagaagcttcaccacaaaagcgaaatgggcacaccacaggtaagactttaatccggtttcttctcccctctgggaagtttcgggctgaaattacattcacagctctcactcacatttttaggcaaataagtgaagttggtttgccagtgttccttgacagaagttgagcgtctgtgtatgctctactgggaaatttgtctttgtcttagactagaaagtgtaacttctgtacatcttctcctaaaaacaagggtagagccaatggaaagtaatggttctgttacatagaatgagttgttgccttgatcttaaatgatgtattggtagatatacttcccaagtggattaaaaagttaaaacttacagcataacaaagtattagacttactgaggtgacttgaatatctccttttgattttcactctatttttcttttcacccatgggaaaatgataattttttaataaaccaaggctcttaccatagctgaactttaaaacttagactgtcttttctgtaaacgattctgaggcaaagggaaatgactagaagaggatgagtaaacaataacctgaaatgggaaactcgagggaagcacaggttttttttgttttgttttgtttggttcgttttttgttctttggggtttttttgagacagaatttcgctctcgttgcccaagttggagtgcaatggcgcgatcttggctcactgcaacctccgcctcccgggttcaagcgattctcctgcctcagcctcccaagtagctgtgattccaggcacgtgccaccacaccagctaattttttgtattttaatagaaacagggtttcaccgtgttagccaggctggtctcaaactgacctcagatgatccgcccgccttggcctcccaaagtgctgggattacagatgtgagccaccgcgcccggccagagcactgttttttttaatggccttgcactcttcttatggacctttgctgccctcagttgaccaaacatgacatcagaaacagatacatttgtgtgttttaaaaacagctcctaatactggaacaaaaatatttaactgtcttgacaatactcatgagtatctgcatggcgacttcagagttgagtttaatcaaagagtttattcttaggtcctagtagaagagctaacctcacactcatcccattctaaactatgtgattcaacactgattttacatccaacaaagtgaaatcttgatagttgggtgtaaaaaggagagtaatggagatttcagagtagttggggttgcttacttttcatttttaattctttaggttttgtaagttacacacttcaagcattatagatgatcctctttttactactgaactaatgaagcctttttcattgcattgttctgcatttatttctacagggagaaaactggttgtcctggatgtttgaaaagttggtcgttgtcatggtgtgttacttcatcctatctatcattaactccatggcacaaagttatgccaaacgaatccagcagcggttgaactcagaggagaaaactaaataagtagagaaagttttaaactgcagaaattggagtggatgggttctgccttaaattgggaggactccaagccgggaaggaaaattcccttttccaacctgtatcaatttttacaacttttttcctgaaagcagtttagtccatactttgcactgacatactttttccttctgtgctaaggtaaggtatccaccctcgatgcaatccaccttgtgttttcttagggtggaatgtgatgttcagcagcaaacttgcaacagactggccttctgtttgttactttcaaaaggcccacatgatacaattagagaattcccaccgcacaaaaaaagttcctaagtatgttaaatatgtcaagctttttaggcttgtcacaaatgattgctttgttttcctaagtcatcaaaatgtatataaattatctagattggataacagtcttgcatgtttatcatgttacaatttaatattccatcctgcccaacccttcctctcccatcctcaaaaaagggccattttatgatgcattgcacaccctctggggaaattgatctttaaattttgagacagtataaggaaaatctggttggtgtcttacaagtgagctgacaccattttttattctgtgtatttagaatgaagtcttgaaaaaaactttataaagacatctttaatcattccaaaattgtgtccgttttcttgagcgttttgattttttacttttagcttataccagctgaatggcagccttgcctaatccacctacaacaagaatttcttaagctttcttttatttgcatgagagagccactaccaaggcatgttttgttatgctgaaactgggctgctgcatactgctaaatggcacctctgggattggcctacctggggatttcttggtttgtgaaaacaggagaggagaaatatctcatacaagtgaaaggatactggagagagaaattacccatttctaaaaaaaaaccacactctgtcgtatctgtgttaatgttttctagcatgtactctggtttcaacagacacaaatttatatgttaacccagttttcttgccgttctgtaagtgttttattcttagtgtgatttttttccattgggatgtttttgattgaacttgttcattttgttttgcttgggaggaaaataaacaattttacttttttcctttaggagcattatgagcattatgtcagaatagaatagaattggggttcgatcttaacaggccagaaatgcctgggtttttttggtttgtttttgtttttgtttttttatcaaatcctgcctgactgtctgcttgttttgcctaccatcgtgacatctccatggctgtaccaccttgtcgggtagcttatcagactgatgttgactgttgaatctcatggcaacaccagtcgatgggctgtctgacattttggtatctttcatctgaccatccatatccaatgttctcatttaaacattacccagcatcattgtttataatcagaaactctggtccttctgtctggtggcacttagagtcttttgtgccataatgcagcagtatggagggaggattttatggagaaatggggatagtcttcatgaccacaaataaataaaggaaaactaagctgcattgtgggttttgaaaaggttattatacttcttaacaattctttttttcagggacttttctagctgtatgactgttacttgaccttctttgaaaagcattcccaaaatgctctattttagatagattaacattaaccaacataattttttttagatcgagtcagcataaatttctaagtcagcctctagtcgtggttcatctctttcacctgcattttatttggtgtttgtctgaagaaaggaaagaggaaagcaaatacgaattgtactatttgtaccaaatctttgggattcattggcaaataatttcagtgtggtgtattattaaatagaaaaaaaaaattttgtttcctaggttgaaggtctaattgatacgtttgacttatgatgaccatttatgcactttcaaatgaatttgctttcaaaataaatgaagagcagctgtccttctttcctcttttaagtgttcagctgtggcatgctcagaggttcctgctggattccagctggagcggtgtgatacccttctttttcagctgttcgtgccttcctttcttgtatccaccaaagtggagacaaatacatgatctcaaagatacacagtacctacttaattccagctgatgggagaccaaagaatttgcaagtggatggtttggtatcactgtaaataaaaagagggcctgggaattcttgcgattccaaaaaaaaaaaaaaaaaaaaaaa

SEQ ID NO: 18 - protein, 124 aa, Homo sapiens [sequence omitted]

SEQ ID NO: 19 - DNA, 1625 bp, Homo sapiens
  CDS (135)..(839)
ctcaggccggggcgcgaccgcggatccgcagttcccgggccagcctggggcggccggccaggaaccacccgttaaggtgtcttctctttagggatggtgaggttggaaaaaggctcctgtaaccctcctccaggatgaaccacctgccagaagacatggagaacgctctcaccgggagccagagctcccatgcttctctgcgcaatatccattccatcaaccccacacaactcatggccaggattgagtcctatgaaggaagggaaaagaaaggcatatctgatgtcaggaggactttctgtttgtttgtcacctttgacctcttattcgtaacattactgtggataatagagttaaatgtgaatggaggcattgagaacacattagagaaggaggtgatgcagtatgactactattcttcatattttgatatatttcttctggcagtttttcgatttaaagtgttaatacttgcatatgctgtgtgcagactgcgccattggtgggcaatagcgttgacaacggcagtgaccagtgcctttttactagcaaaagtgatcctttcgaagcttttctctcaaggggcttttggctatgtgctgcccatcatttcattcatccttgcctggattgagacgtggttcctggatttcaaagtgttacctcaagaagcagaagaagaaaacagactcctgatagttcaggatgcttcagagagggcagcacttatacctggtggtctttctgatggtcagttttattcccctcctgaatccgaagcaggatctgaagaagctgaagaaaaacaggacagtgagaaaccacttttagaactatgagtactacttttgttaaatgtgaaaaaccgtcacagaaagtcatcgaggcaaaaagaggcaggcagtggagtctccctgtcgacagtaaagttgaaatggtgacgtccactgctggctttattgaacagctaataaagatttatttattgtaatacctcacagacgttgcaccatatccatgcacatttagttgcctgcctgtggctggtaaggtaatgtcatgattcatcctctcttcagtgagactgagcctgatgtgttaacaaataggtgaagaaagtcttgtgctgtattcctaatcaaaagacttaatatattgaagtaacacttttttagtaagcaagatacctttttatttcaattcacagaatggaatttttttgtttcatgtctcagatttattttgtatttcttttttaacactctacatttcccttgttttttaactcatgcacatgtgctctttgtacagttttaaaaagtgtaataaaatctgacatgtcaatgtggctagttttatttttcttgttttgcattatgtgtatggcctgaagtgttggacttgcaaaaggggaagaaaggaattgcgaatacatgtaaaatgtcacgagacatttgtattatttttatcatgaaatcatgtttttctctgattgttctgaaatgttctaaatactcttattttgaatgcacaaaatgacttaaaccattcatatcatgtttcctttgcgttcagccaatttcaattaaaatgaactaaattaaaaaaaaaaaaaaaaaaaaaaa

SEQ ID NO: 20 - protein, 234 aa, Homo sapiens
MNHLPEDMENALTGSQSSHASLRNIHSINPTQLMARIESYEGREKKGISDVRRTFCLFVTFDLLFVTLLWIIELNVNGGIENTLEKEVMQYDYYSSYFDIFLLAVFRFKVLILAYAVCRLRHWWAIALTTAVTSAFLLAKVILSKLFSQGAFGYVLPIISFILAWIETWFLDFKVLPQEAEEENRLLIVQDASERAALIPGGLSDGQFYSPPESEAGSEEAEEKQDSEKPLLEL

SEQ ID NO: 21 - DNA, 8525 bp, Homo sapiens
  CDS (148)..(8181)
  misc_feature (4303)..(4305): Xaa=valine or isoleucine
ggtgggctagaggccgacgccagccagagagcgaaatgttcttttggggccagagtctgggcatatatgaatgcaaatccgtgtttgttcacaactaagcccagctgagacgatcacttttctgtaggccatttgtccaggtacagaatgagcacatgttgttggtgtacgccaggtggtgcttccaccattgacttcctaaagcgctatgcttccaacactccgtccggtgaatttcaaacagccgacgaagacctctgctactgcttggagtgtgtggctgagtaccacaaagcaagagatgaattgccattcttgcatgaggttttatgggaattagaaaccttacgtctcataaatcactttgaaaaatccatgaaggcagaaattggagatgatgatgagttatatatagtagacaataatggagagatgccactgtttgacatcactgggcaagactttgaaaataagcttcgagttcctcttcttgaaatactgaaatatccttacttgcttctacatgaacgtgttaacgagttatgtgttgaagcactttgtcggatggaacaagccaattgctcctttcaggtgtttgataaacatccagggatctatttgtttttagtccatcccaatgaaatggttcggcgttgggctatcttgactgcaagaaacttggggaaagtggacagagatgattattatgacttacaagaagttttactttgcctttttaaagtcattgagttggggcttttagagagtccagacatttatacttcttctgtcctagagaagggtaaactgattcttctgccctcacacatgtatgatactaccaactacaaaagctattggttaggtatttgcatgttgctgaccattcttgaggaacaagccatggattccctgttgttgggctcagacaaacaaaatgattttatgcaatcgatacttcacactatggagagggaagcagatgatgatagtgtggatcctttctggccagcgttacactgttttatggtgattctggatcgccttggatctaaggtctggggtcaacttatggatcctattgtggcatttcaaaccattatcaacaacgcaagctacaatagagagatccgacatatacggaacagctctgtaaggaccaagttagaaccggagtcctatttggatgatatggtgacttgcagccagatcgtatacaattacaatcctgaaaagaccaaaaaggattctggatggagaacagccatttgcccagattattgtcctaacatgtatgaagaaatggaaacattagccagtgtacttcagtcagatattggtcaagacatgcgtgttcataacagcacatttctatggttcatcccttttgtccagtccctcatggatcttaaggatttgggtgtggcttacatagcacaggttgttaatcatctgtactctgaagtcaaagaagtcctcaaccaaacagatgctgtgtgtgacaaagtcactgaattttttcttctaattttggtatcagtgattgaactgcatagaaataaaaaatgtttgcatttgctgtgggtaagttcccagcaatgggtggaagccgtcgtcaaatgtgccaagcttcctaccactgcgtttacacggagttctgagaaatcatctggaaattgctccaaaggaacagcaatgatatcttcactgtcattgcattccatgccatctaactctgtacaacttgcttatgtgcagctgattagaagtctccttaaagaaggttatcagcttgggcagcagtctctttgcaagcgattctgggataagctcaacttattccttagaggaaatttatctctaggttggcagttgactagtcaggaaacccatgagctacaaagttgcttaaagcaaattattagaaacataaaattcaaagcacctccatgtaacacttttgtggatctgacttctgcatgtaaaatctctcctgcatcttataataaagaagaaagtgaacaaatggggaagacgtctagaaaagatatgcattgtttggaagcttccagcccaacattttctaaagaaccaatgaaagtgcaagacagtgtattgatcaaagcagataacactatagaaggtgacaataatgagcaaaattatataaaggatgtgaaactagaggaccatctcttagctgggtcatgcttaaagcagagtagtaaaaacatttttactgaaagagctgaagatcaaattaaaataagtacaaggaagcagaagtctgtaaaagagatctcttcatatacaccaaaggactgtacttcaagaaatggtccagaaaggggatgtgacagaggaataatagtatcaacacgtttgttgactgattctagcactgatgctttggaaaaagtgtccacatcgaatgaagatttctctttaaaggatgatgctcttgctaaaacctcaaaacgaaaaactaaggtacagaaagatgaaatctgtgcaaagttatcacatgtaataaagaagcaacacaggaagagtactttggtcgataatactatcaatttagatgaaaatttgactgtatctaacattgagagtttctattcaaggaaagatacaggagttcagaaaggagatggtttcatacacaatctttctttagaccctagtggtgttctggatgataagaatggagaacaaaaatctcaaaacaatgtattgccaaaagagaaacaattaaagaatgaagaattagttattttctctttccatgaaaacaattgtaaaatacaggaatttcatgttgatggtaaagaattgatcccttttacagaaatgaccaatgcttcagagaagaaatcatctccctttaaagatcttatgactgtacctgaatcaagagatgaggagatgagtaatagtaccagtgtgatttattctaacttgacaagagaacaggcccctgacatcagtcctaaatctgacaccttaacggattctcagatagacagagaccttcacaaattatctttactagctcaagccagtgttattacgttcccatccgattcacctcagaactcatcgcagctgcaaaggaaagtaaaagaagataaaagatgtttcacagctaaccaaaataatgttggagatacctcccgtggacaggttattattatttcagattctgatgatgatgatgatgaaagaatcctgagtcttgagaaactcactaaacaggacaaaatatgccttgagagggaacatccagagcagcacgtttcaacagttaatagtaaggaggaaaagaatccagtaaaggaagaaaagacagagactctttttcagtttgaggaatctgattctcagtgttttgagtttgaaagttcatctgaagtgttttcagtttggcaagatcatccagacgataataattcagttcaagatggtgagaaaaaatgtttggctcctatagccaatactacaaatggtcagggttgtacagattatgtatctgaagttgttaaaaaaggagcagagggcattgaagaacacacaagaccacggagtatttctgttgaagaattttgtgaaattgaagtaaaaaagcctaagagaaaacgatctgaaaaaccaatggctgaagatcctgtgaggccttcatcttctgtcagaaatgagggccagtctgatactaataagagagatcttgtgggaaatgattttaaaagtattgatagaaggacttcaactcccaattcacgtattcagagagccactacggtttcacaaaagaagtcttcaaagctttgtacttgtacagaacccatcaggaaagttccagtttctaagacccctaagaaaactcattcagatgccaaaaaaggacagaatagaagttcaaattacctaagttgtagaacaactcctgctatagtgccgccaaagaaatttcgtcagtgtcctgagccaacttcaacagctgagaaacttggcctgaaaaagggtcctcgtaaggcatatgagttgtcccagcggtctttggattatgtagctcaattacgtgatcatggcaaaactgttggagtagttgatacccgaaaaaagactaaattaatttctcctcagaacctgtctgtcagaaataataagaaacttctgactagtcaagaacttcagatgcaaaggcagatcagacccaaatcacaaaaaaatagacgaagactttctgattgtgaaagtacagatgttaaaagagcagggtcacatacagcacagaattctgacrtatttgtaccagaatctgataggtcagattataattgtacaggaggaactgaggtacttgccaacagtaacagaaaacagttaataaaatgcatgccttctgaaccagaaaccataaaagcaaaacatgggtctccagcaactgatgatgcttgccctttgaaccagtgtgattctgtagtgttaaatggaacagtaccaacaaatgaagtaattgtctccacttcagaagaccctctgggtggaggtgatccaacagcacgtcatatagagatggcagctttgaaagaaggagagcctgactccagcagtgatgcagaggaagataacttatttttaacccaaaatgatcctgaagatatggatttatgttcacaaatggagaatgacaattataaactcattgaactaattcatggaaaagatacagttgaggttgaagaagattctgtaagtcggcctcagttggaatctttgagtggcacaaagtgtaagtacaaagattgtcttgaaaccacaaaaaaccagggtgaatactgcccaaaacactctgaagtgaaagcagcagatgaagatgtatttcgtaaacctggcttgcctcctcctgcatctaaacctttgagacctaccactaagatttttagctcaaagagtacttcacgaattgctggtctttctaaatctttggaaacttcttcagcactttcaccgtctctaaaaaataagtcaaaggggatacagtcgattttgaaagtaccacagccagttcccctcatagctcagaagccagttggtgaaatgaagaattcgtgcaatgttcttcatcctcagtctccgaataattccaacaggcaaggttgcaaagttccatttggtgaaagcaaatattttccatcttcctctccagtaaacattcttttgtcatcacagtctgtctctgacaccttcgttaaagaggtcttaaaatggaaatatgaaatgtttttgaactttggtcagtgtgggccccctgcaagtctttgtcagtccatctcaagacctgtgcctgtcagatttcacaattatggagattattttaatgtttttttccctttgatggtattgaatacttttgaaacagtggcacaagaatggctcaactctccaaatagagagaatttctatcagttgcaagtacgaaaatttcctgccgattatataaaatactgggagtttgcagtttatctggaagaatgtgaactggctaaacagctttatccaaaggaaaacgatttggtgtttttagctcctgagagaataaatgaagagaagaaagatacagagagaaatgacatacaagatctccacgaatatcattctggttatgttcataaatttcgccgcacgtcagtcatgcgtaatgggaaaactgagtgttacctttccatccagactcaagagaactttccggccaatttaaacgaacttgtgaattgtattgtaatcagttctctggtaactacacaaaggaagttgaaagccatgtctctgttgggtagtcggaaccaactggctagagctgttctgaatccaaaccctatggacttctgtacaaaagatttactgactacaacatctgagagaattattgcgtacttaagagatttcaatgaagatcaaaagaaagcaatagaaactgcatatgctatggtgaaacactcaccatcagttgccaaaatctgcttgattcatggaccacctggaacaggaaaatcaaaaactattgttggcctcctctatcgtctactgacagagaaccagaggaaggggcattcagacgaaaactccaatgccaaaatcaaacaaaaccgtgtcctcgtgtgtgcaccttccaatgcagctgttgatgaactcatgaaaaaaattatccttgaattcaaagaaaaatgtaaagacaagaagaatcctttaggaaactgtggagatataaatttagtacgactgggtccagaaaagtctattaatagtgaggttctaaagttcagtttggacagccaagtaaaccacagaatgaaaaaagagttaccttctcatgttcaggcgatgcataaaagaaaggaatttctagattatcagctggatgagctttcccggcagcgagctctatgccgaggtggacgggaaatacagaggcaagaattagatgaaaacatttccaaagtttctaaggaaaggcaggaacttgcttctaaaattaaagaggttcaaggacgcccacagaaaacacagagtatcatcatcttagagtcccatatcatctgctgcacgttgagcacaagtggtggtttactacttgagtctgctttccgtgggcaagggggtgtccccttcagctgtgtcattgttgatgaggctggacagtcttgtgaaattgagactcttactccactcatccatcgctgcaataagctcatcctagtaggagatcctaagcagctccctccgacagtcatctctatgaaagcacaggagtatggctacgaccagtcaatgatggctcgcttctgcagactgctggaagagaatgtagaacacaacatgatcagcaggctgcccattctacagctcactgttcagtacaggatgcatccagacatatgcctcttcccttctaattatgtttataacagaaacttaaaaacaaatagacagacagaagccattcgatgttcatcagattggccatttcagccataccttgtgtttgatgttggagatggttcagaaagacgggataatgactcatatataaatgttcaagaaataaaactggtgatggaaataattaagcttattaaagacaaaagaaaggatgttagttttcgaaacattggcataataactcattacaaggcccagaagacgatgattcagaaggatttggacaaagagttcgatagaaaaggaccagcagaagtagacactgtggatgcattccagggtcggcagaaggattgtgttattgttacgtgtgtcagagcaaatagcatccaaggttcaattggattcctggcaagtttgcagagattgaatgtcaccatcacacgagccaagtacagcctcttcatcctcggacatttgaggaccctgatggaaaaccagcattggaatcagctgattcaggatgctcagaagcgtggtgccattattaagacctgtgacaaaaactatagacatgatgcagtgaagattctgaaactcaagcctgtgctgcagagaagtctcactcaccctcctaccatagccccagaggggtccagaccccagggtggtttgcccagcagcaagctagacagtggatttgccaagacatctgttgctgcttctctataccacacaccctctgactccaaggaaattactcttactgttacttcaaaggaccctgaaagacctcctgttcatgaccaacttcaggacccacgactgctgaagaggatgggcattgaggtcaaaggaggaatattcctttgggatccacaaccctcgagcccccagcatcctggagcaacacctcctacgggcgagccgggcttccctgtcgttcaccaggacctgagccatatacagcagcccgctgctgtagtggctgctctgagcagccacaaacctcccgtgcggggcgaacctccagctgccagtcccgaggcttccacgtgtcagagcaaatgtgatgacccggaagaggagctctgtcacaggagagaggccagggctttcagtgaaggggagcaggagaagtgtggttccgagacccatcacaccaggaggaactctaggtgggacaagaggacactggagcaggaggacagcagttccaagaaaagaaagcttttataggaaagcccagtgacatgggccagcagccacagcatattgtaaactgaagatgaccagctcgtgggaccatctagataagcttgttttttgtaaggagtttgtgtgctgttggaaaacatggaaaatgcatccttaacacctgagcctctggtcatcttcagtattttctgtcatttgcaaaagctttcagagggcattgtgtatccgtaataatgtccttgaagtcagagactggaaatgttgatctcttagtcttctatagacaaggaggtcagactggagtgaatgttgtaaaagttgaaatgtatatttgtatagcaaataacaaaatccttttaaaattt

SEQ ID NO: 22 - protein, 2677 aa, Homo sapiens
  misc_feature (1386)..(1386): The 'Xaa' at location 1386 stands for Val, or Ile.
MSTCCWCTPGGASTIDFLKRYASNTPSGEFQTADEDLCYCLECVAEYHKARDELPFLHEVLWELETLRLINHFEKSMKAEIGDDDELYIVDNNGEMPLFDITGQDFENKLRVPLLEILKYPYLLLHERVNELCVEALCRMEQANCSFQVFDKHPGIYLFLVHPNEMVRRWAILTARNLGKVDRDDYYDLQEVLLCLFKVIELGLLESPDIYTSSVLEKGKLILLPSHMYDTTNYKSYWLGICMLLTILEEQAMDSLLLGSDKQNDFMQSILHTMEREADDDSVDPFWPALHCFMVILDRLGSKVWGQLMDPIVAFQTIINNASYNREIRHIRNSSVRTKLEPESYLDDMVTCSQIVYNYNPEKTKKDSGWRTAICPDYCPNMYEEMETLASVLQSDIGQDMRVHNSTFLWFIPFVQSLMDLKDLGVAYIAQVVNHLYSEVKEVLNQTDAVCDKVTEFFLLILVSVIELHRNKKCLHLLWVSSQQWVEAVVKCAKLPTTAFTRSSEKSSGNCSKGTAMISSLSLHSMPSNSVQLAYVQLIRSLLKEGYQLGQQSLCKRFWDKLNLFLRGNLSLGWQLTSQETHELQSCLKQIIRNIKFKAPPCNTFVDLTSACKISPASYNKEESEQMGKTSRKDMHCLEASSPTFSKEPMKVQDSVLIKADNTIEGDNNEQNYIKDVKLEDHLLAGSCLKQSSKNIFTERAEDQIKISTRKQKSVKEISSYTPKDCTSRNGPERGCDRGIIVSTRLLTDSSTDALEKVSTSNEDFSLKDDALAKTSKRKTKVQKDEICAKLSHVIKKQHRKSTLVDNTINLDENLTVSNIESFYSRKDTGVQKGDGFIHNLSLDPSGVLDDKNGEQKSQNNVLPKEKQLKNEELVIFSFHENNCKIQEFHVDGKELIPFTEMTNASEKKSSPFKDLMTVPESRDEEMSNSTSVIYSNLTREQAPDISPKSDTLTDSQIDRDLHKLSLLAQASVITFPSDSPQNSSQLQRKVKEDKRCFTANQNNVGDTSRGQVIIISDSDDDDDERILSLEKLTKQDKICLEREHPEQHVSTVNSKEEKNPVKEEKTETLFQFEESDSQCFEFESSSEVFSVWQDHPDDNNSVQDGEKKCLAPIANTTNGQGCTDYVSEVVKKGAEGIEEHTRPRSISVEEFCEIEVKKPKRKRSEKPMAEDPVRPSSSVRNEGQSDTNKRDLVGNDFKSIDRRTSTPNSRIQRATTVSQKKSSKLCTCTEPIRKVPVSKTPKKTHSDAKKGQNRSSNYLSCRTTPAIVPPKKFRQCPEPTSTAEKLGLKKGPRKAYELSQRSLDYVAQLRDHGKTVGVVDTRKKTKLISPQNLSVRNNKKLLTSQELQMQRQIRPKSQKNRRRLSDCESTDVKRAGSHTAQNSDXFVPESDRSDYNCTGGTEVLANSNRKQLIKCMPSEPETIKAKHGSPATDDACPLNQCDSVVLNGTVPTNEVIVSTSEDPLGGGDPTARHIEMAALKEGEPDSSSDAEEDNLFLTQNDPEDMDLCSQMENDNYKLIELIHGKDTVEVEEDSVSRPQLESLSGTKCKYKDCLETTKNQGEYCPKHSEVKAADEDVFRKPGLPPPASKPLRPTTKIFSSKSTSRIAGLSKSLETSSALSPSLKNKSKGIQSILKVPQPVPLIAQKPVGEMKNSCNVLHPQSPNNSNRQGCKVPFGESKYFPSSSPVNILLSSQSVSDTFVKEVLKWKYEMFLNFGQCGPPASLCQSISRPVPVRFHNYGDYFNVFFPLMVLNTFETVAQEWLNSPNRENFYQLQVRKFPADYIKYWEFAVYLEECELAKQLYPKENDLVFLAPERINEEKKDTERNDIQDLHEYHSGYVHKFRRTSVMRNGKTECYLSIQTQENFPANLNELVNCIVISSLVTTQRKLKAMSLLGSRNQLARAVLNPNPMDFCTKDLLTTTSERIIAYLRDFNEDQKKAIETAYAMVKHSPSVAKICLIHGPPGTGKSKTIVGLLYRLLTENQRKGHSDENSNAKIKQNRVLVCAPSNAAVDELMKKIILEFKEKCKDKKNPLGNCGDINLVRLGPEKSINSEVLKFSLDSQVNHRMKKELPSHVQAMHKRKEFLDYQLDELSRQRALCRGGREIQRQELDENISKVSKERQELASKIKEVQGRPQKTQSIIILESHIICCTLSTSGGLLLESAFRGQGGVPFSCVIVDEAGQSCEIETLTPLIHRCNKLILVGDPKQLPPTVISMKAQEYGYDQSMMARFCRLLEENVEHNMISRLPILQLTVQYRMHPDICLFPSNYVYNRNLKTNRQTEAIRCSSDWPFQPYLVFDVGDGSERRDNDSYINVQEIKLVMEIIKLIKDKRKDVSFRNIGIITHYKAQKTMIQKDLDKEFDRKGPAEVDTVDAFQGRQKDCVIVTCVRANSIQGSIGFLASLQRLNVTITRAKYSLFILGHLRTLMENQHWNQLIQDAQKRGAIIKTCDKNYRHDAVKILKLKPVLQRSLTHPPTIAPEGSRPQGGLPSSKLDSGFAKTSVAASLYHTPSDSKEITLTVTSKDPERPPVHDQLQDPRLLKRMGIEVKGGIFLWDPQPSSPQHPGATPPTGEPGFPVVHQDLSHIQQPAAVVAALSSHKPPVRGEPPAASPEASTCQSKCDDPEEELCHRREARAFSEGEQEKCGSETHHTRRNSRWDKRTLEQEDSSSKKRKLL

SEQ ID NO: 23 - DNA, 4952 bp, Homo sapiens
  CDS (244)..(3480)
ggcacgaggctgagcactccgcagctgggtgcgcacgggagcctcaaccgcggcgcgtggaggcagtaccagagcgcgcggcgcgcagtcggccggcagccgcgggacagccttggcagaacagccgcggcgggagccccgcagccccgggctgggcccgcgtcccggagcgccaccggagagcgaggacgacgtggaggcggagtggcgcccggcgaggtagcgccaggcgagctggagaccatggccaaaatggaggtgaaaacctcacttctggacaatatgattggagttggggatatggttcttttagaacctctcaatgaggagaccttcatcaacaacctcaagaagcgctttgaccacagtgaaatatacacatacattggaagtgtggttatatctgttaacccataccggtctttacccatttattcaccagagaaagtggaagaatacaggaacagaaatttttatgaactgagccctcacatctttgccctttcggatgaagcatacagatccctacgagatcaagataaggaccaatgtattctcattactggggaaagtggagcaggaaaaacagaggccagtaagcttgtcatgtcctatgtggcagctgtttgtggaaaaggagcagaagttaatcaagttaaagaacagcttttacagtccaacccggtcctggaagcttttggaaatgccaaaactgtaaggaatgacaactcctctagatttggcaaatatatggatattgaatttgactttaaaggcgatccactaggaggagtaataagtaactatcttttagagaaatctcgggttgttaaacagccaagaggtgaaagaaacttccatgtgttctatcagctgctctctggtgcctctgaagagctcctcaataaacttaagcttgagagggatttcagcaggtataactacctgagtctggattcggccaaagtgaatggagtggatgatgcagcaaattttagaaccgtgcggaatgccatgcagattgtgggctttatggatcatgaagctgagtctgtcttggcggtggtggcagcagtgttgaaactggggaacattgagttcaagcccgaatctcgagtgaatggtctagatgaaagcaaaatcaaagataaaaatgagttaaaagaaatttgtgaattgaccggcattgatcaatcagttctagaacgagcattcagtttccgaacagttgaggccaaacaggagaaagtttcaactacactgaatgtggctcaggcttattatgcccgtgatgctctggctaaaaacctctacagcaggttgttttcatggttggtaaatcgaatcaatgaaagcattaaggcacaaacaaaagtgagaaagaaggtcatgggtgttctggacatttatggctttgagattttcgaggacaacagctttgagcagttcattattaattattgtaacgaaaagctgcaacaaatcttcattgaacttactcttaaagaagagcaggaggagtatatacgggaggatatagaatggactcacattgactacttcaataatgctatcatttgtgacctaatagaaaataacacaaatggaatcctggccatgctggatgaagagtgcctcagacctggcacagtcactgatgagaccttcttagaaaagctgaaccaagtatgtgccacccaccagcattttgaaagcaggatgagcaagtgctctcggttcctcaatgacacgtctctgcctcacagctgcttcaggatccagcattatgctggaaaggtgctgtaccaggtggaaggattcgttgacaaaaacaatgaccttctctatcgagacctgtcccaagccatgtggaaggccagccatgccctcatcaagtctttgttccccgaagggaatcccgccaagatcaacctgaaaaggcctcctacagcaggctcacagttcaaggcatccgtggccactctgatgaaaaacctacagaccaagaacccaaactatattaggtgtatcaaaccgaatgataaaaaagcagcacacatcttcaacgaggctctagtgtgtcatcagatcaggtacctggggcttttggagaacgtccgagtgcggagggcaggctacgccttcaggcaggcctatgaaccttgcctagaaagatacaaaatgctttgtaaacaaacatggcctcattggaaaggaccagccaggtctggtgtggaggtcctatttaatgaattagaaattcccgtggaagaatactcctttggtagatcaaagatattcatccgaaacccaagaacattattcaaattagaagacctgaggaagcaacgcctggaggacttggccactctcattcagaagatatatcgggggtggaaatgccgcacacacttcctgctaatgaaaaaaagccaaattgtgattgccgcctggtacaggagatatgcgcaacaaaagaggtaccagcagacaaagagttccgccttagtaattcagtcttatatccggggttggaaggctcgaaaaattctgcgggaactgaagcatcaaaagcgctgtaaggaagcagtcacgaccattgctgcatattggcatgggacccaggtacgtagagaatacaggaaattcttcagagccaatgctggaaagaaaatctatgagtttacgcttcagagaattgtgcaaaaatacttcttggaaatgaaaaataagatgccttccttatctccaatagacaagaattggccctcaagaccttacttattcttggattctactcacaaggagctaaaaaggattttccacttgtggaggtgtaaaaaatacagggaccaattcacagaccagcagaaacttatttatgaagagaaactagaagccagtgaactcttcaaagacaagaaggctttatacccatctagtgttgggcaaccattccaaggggcttacctggaaatcaacaagaaccccaagtataagaaactcaaagatgccattgaagaaaagatcatcattgctgaagtcgtgaacaaaattaaccgtgctaatgggaagagtacatctcggattttcctcttaacaaacaataatctccttcttgctgaccaaaagtctggacaaatcaagtcagaggttccactggtggatgtgaccaaggtatcaatgagctcacaaaatgatggcttcttcgccgtccacctcaaagagggctcagaagcagctagtaaaggagactttctcttcagcagtgatcacctgattgaaatggccaccaagctctatcgcacaactctcagccaaaccaaacagaagctcaatattgagatttccgatgagttcctggtacagttcagacaggacaaagtatgtgtgaagtttattcagggaaaccagaaaaatgggagtgtcccaacatgtaaacgaaaaaacaaccgtctccttgaagttgctgtcccttaactggcgcctcctctctactttcatggacttgttcctttgtaatagtgcaatttggttttgttttatttggggttcattgtatgtttgggaatcaccaaaggcttttagagttctttggcaaaataaaaatatttgactaatcaatttttattattggaatagttttaacctttcaaatacatgttctgtcctggagcaggattgtagaaactaacagtgtctattttcatgtctgatgtgttcttcctttagtcatcatgttaggtctgtgtaccctaaatcagcatattactcataaatcattaattaatataagcataggaaatggtcttaaaagatactgcattcattcatcagatatttattccatgcctactctatgctaggcactgtgctagatggtatgaaaacttattaggaacctttttgtttttgagaccattgcattctggctggtttgtgctggtttaacgacatctaagaaggtttagaaatggtgagaccaaaacaataactgttaatgatggacagcattattaggaaccctgtagtatgatatttaacaatataggcttcaagaagggctggtcctaagagggggcagaaatgaatgaccaggttaaatccctctacatgtggtttctgtttgaaaaaaagaaaactgacatttgaacaggacttttaatttgtttaaaactctggtaattacttgtaacagtagaaaatagaagtcattcttattttagaaaaagtgacagaagcagtccagtaagattatatgtttctgtttctggtaaataccatatatgatcctcgaaatgataatatctccagaatattgttttcacccaaatttgagtagatattttaaacacctaacaaagtaaagggctaaaagccattcagatagcagtaaaacattctgtatgatgtgcaataaaacatccaagatcttttttgaaagttttatttataatatacatttttgtatgagaaaggtgattggtacagggtgcctattttagtcatggatcaaaatttgtgtaacttgcagggctttctttctttttcttcaaatttacaagggttcattttggaaactacattttaaactttggaatcaaattgtttcttatttgggaggataatgtatatacattggtattatgttaaataataaaattgttctaatttggtgccatttcctgaatcacaactgtatttttgtatctcaagctattttcatatgttatgtgtcaatgtatcatctctcagaaaggttttacaatccaaacattatatgttctctgtgtaactgaatttcacttatcttttataaaccagaaacattaattgaaaatattttctggggattttctcttgacttgtatttttaaaaattgctcacataaagaagttctcagaaaaaaaaaaaaaaaaaaaaaaaaaaaaaaaaaaaaaaaaaaaaaaaa

SEQ ID NO: 24 - protein, 1078 aa, Homo sapiens
MAKMEVKTSLLDNMIGVGDMVLLEPLNEETFINNLKKRFDHSEIYTYIGSVVISVNPYRSLPIYSPEKVEEYRNRNFYELSPHIFALSDEAYRSLRDQDKDQCILITGESGAGKTEASKLVMSYVAAVCGKGAEVNQVKEQLLQSNPVLEAFGNAKTVRNDNSSRFGKYMDIEFDFKGDPLGGVISNYLLEKSRVVKQPRGERNFHVFYQLLSGASEELLNKLKLERDFSRYNYLSLDSAKVNGVDDAANFRTVRNAMQIVGFMDHEAESVLAVVAAVLKLGNIEFKPESRVNGLDESKIKDKNELKEICELTGIDQSVLERAFSFRTVEAKQEKVSTTLNVAQAYYARDALAKNLYSRLFSWLVNRINESIKAQTKVRKKVMGVLDIYGFEIFEDNSFEQFIINYCNEKLQQIFIELTLKEEQEEYIREDIEWTHIDYFNNAIICDLIENNTNGILAMLDEECLRPGTVTDETFLEKLNQVCATHQHFESRMSKCSRFLNDTSLPHSCFRIQHYAGKVLYQVEGFVDKNNDLLYRDLSQAMWKASHALIKSLFPEGNPAKINLKRPPTAGSQFKASVATLMKNLQTKNPNYIRCIKPNDKKAAHIFNEALVCHQIRYLGLLENVRVRRAGYAFRQAYEPCLERYKMLCKQTWPHWKGPARSGVEVLFNELEIPVEEYSFGRSKIFIRNPRTLFKLEDLRKQRLEDLATLIQKIYRGWKCRTHFLLMKKSQIVIAAWYRRYAQQKRYQQTKSSALVIQSYIRGWKARKILRELKHQKRCKEAVTTIAAYWHGTQVRREYRKFFRANAGKKIYEFTLQRIVQKYFLEMKNKMPSLSPIDKNWPSRPYLFLDSTHKELKRIFHLWRCKKYRDQFTDQQKLIYEEKLEASELFKDKKALYPSSVGQPFQGAYLEINKNPKYKKLKDAIEEKIIIAEVVNKINRANGKSTSRIFLLTNNNLLLADQKSGQIKSEVPLVDVTKVSMSSQNDGFFAVHLKEGSEAASKGDFLFSSDHLIEMATKLYRTTLSQTKQKLNIEISDEFLVQFRQDKVCVKFIQGNQKNGSVPTCKRKNNRLLEVAVP

SEQ ID NO: 25 - DNA, 6545 bp, Homo sapiens
  CDS (617)..(3052)
ataaatctgtagttctcagtaatattcttgaaaatggtaaatgatcaaatactttggagaccattggtctaaaattactctataacccatttccttggctttttttctcaagacagcaccaggccatctcctgtgctgtctgccattttgttgatgtgtgcagtgtgttggaggccctcacctttgcttgtatcatggccctatgcttatgaagaacgtaatagagtgtttttcataattcaaccaacagctgtacttcctcagttaagctcaaaacagagccaactttgctcctaatgttagtctactgtgtttgtactttcaccttagtacttgtaacatattaccacacatattttcttaccactctgtgtgttctttgaacacaggaagatttttattaatcttagtatttccagcagtgatgatagttccaggtactttgtaggaacttgataatttcttttgcatgaattaatatcttaatgcattaatggcagaatatttctgttatgatttctttttccctaaaagtataaaacaaaacaatattctgtgaataataatcatggtaaggattagcccatacttcttttttcatgccacctaattctgaatgtttcaggtagaacagaagtcccaggagtcagtatcatttaaagatgtgactgtgggcttcacccaggaggagtggcagcacctggaccctagtcagagggctctgtatagagatgtgatgctggagaactacagcaaccttgtctcagtggggtattgtgttcacaaaccagaggtgatcttcaggctgcaacaaggagaagagccatggaaacaggaggaagaattcccaagccaaagctttccagaagtctggacagctgatcacctgaaagagaggagccaagaaaaccaatctaaacatttgtgggaagttgtattcatcaataatgaaatgctgactaaggaacaaggtgatgtaataggaataccatttaatgtggatgtaagttcttttccttccagaaaaatgttctgtcagtgtgattcatgtggaatgagtttcaacactgtttcagaattggttatcagtaagataaactatttaggaaaaaagtctgatgaatttaatgcctgtgggaaattgttactcaatattaagcatgatgaaactcatactcaagagaaaaatgaagttttgaaaaataggaacacactgagtcatcatgaggagactttgcagcatgagaagattcaaactttagagcacaattttgaatacagtatatgtcaggaaaccctccttgaaaaggcagtattcaatacacagaagagagagaacgcagaagagaataactgtgattataatgaatttgggagaactttgtgtgatagttcatccctcttgttccatcagatatctccgtcaagggacaatcactatgaatttagtgattgtgagaagttcttatgtgtgaagtccaccctttctaaacctcatggggtatctatgaaacactatgattgtggtgaaagtgggaataatttcaggaggaaattgtgtctgtcacaccttcagaaaggtgataaaggagagaaacactttgaatgtaatgaatgtgggaaagctttctgggagaagtcacatctcactcgacatcagagggtgcacacaggacagaaaccctttcaatgtaatgaatgtgaaaaagctttctgggataagtcaaacctcactaaacatcaaagatcacacacaggggagaaaccttttgaatgcaatgaatgtgggaaagcctttagccataagtcagccctcacattacaccagagaacacatacaggggagaaaccctatcaatgtaatgcgtgtgggaaaactttttgccagaaatctgacctcactaaacatcagagaacacacacagggctgaaaccctatgaatgttatgaatgtggaaaatccttccgtgtgacttcgcaccttaaagtacaccagagaactcacacaggtgagaaaccttttgaatgtcttgagtgtgggaaatcctttagtgaaaagtcaaatcttacacagcatcagagaattcacataggagataaatcttatgaatgtaatgcatgtgggaaaactttctaccacaagtcattactcaccaggcatcagataattcatacagggtggaaaccttatgaatgttatgaatgtgggaaaaccttctgcttgaagtcagacctcacagtacatcagagaacacacacagggcagaaaccctttgcatgtcccgaatgtgggaaattctttagccataagtcaaccctctctcaacattatagaacacacacaggggagaaaccctacgaatgtcatgaatgtggaaaaatcttttacaataaatcatacctaactaaacataatagaacacatacaggggagaaaccctatgaatgtaatgaatgtggaaaagccttctaccagaagtcacaactcactcagcatcagagaattcacataggggagaaaccctataaatgtaatgagtgtggaaaagctttctgccataagtcagctctaattgtacatcagagaacccatacacaagaaaagccctataaatgtaatgaatgtggaaaatctttctgtgtaaaatcaggacttattttccatgagagaaagcacacgggggagaaaccctatgaatgcaatgaatgtgggaaattcttcaggcacaaatcatcactcacagtacatcacagggctcacacaggagagaaatcttgtcaatgtaatgaatgtggaaaaatcttttaccgtaaatcggaacttgctcaacatcagagatcacatacaggggaaaagccctatgaatgtaacacatgcaggaaaactttctctcaaaagtcaaatctcattgtacatcagagaagacatataggagaaaaccttatgaatgaaatggatattagaaatttccagccacaagtcagcctccataatgcctcagagtattcacactgtggagaaagccctgatgacatcctgaatgttcagtaactatccacaaactcaccttatgttactccaaagtaatagtaggggataaacccatagactacaacaattataggacagcttttgttaggaagtgatattctatgtaatatcagatggttaatacgggcataacaccttacagattttttttgaatttgtgaaagtttttggcaaaaatgcaaataaggttatgttagaatttacactgaggagaaaattgtcaatttaagaaatctaaagtgaaaattttgcttagaaataaaatacgacaagttatgttttgagtttgatgccataatagtttttagggcacctaacaataatttatagatgtatattgtggaatgtaaagctttaagaacttaaacaaaggtaataattaaaataacctcacaagaagtttaatgagtagagagaattcccatgtacacttcaccaaacttcctctaaggataatgtataatcatagtatatggtcaagtccaagaaatcgatgttaccttgctggtagatagagacttagtcagattttactatggtttgcatgcactctgtgtgtgtgtgtacgtgtatgtgtgtgtgtgtggttatatcaaacttttacgacttttacatttgagtaaccatcaacacgattagtttacagaactgaaaaggaatctgagatctgtactgtatcaggattacaaaggatttagcctcaagtagttccctttttgtattaataaccacacgctttctgcaaccctatcccttgcatccacttgactatgaagtttttttaaagcacagataaattgaataatcagggcaatagcattaagcacatctgcgaattatccctgaagttcaaaagacttatatatgtataagtggtatgtgatataaatcgtgtgtttcatatgcataatggaatttaacgtaattgtgaataggaagtaggtatcctagtttagtagtggttacattatcaggcccatcccagatgtttgtgatgtcctgaaacaatttaaaaggagacccacagagctaatgtttatccatttaaaaggtataaatcaaaataacaaattatctaaaaaaaatctatcctgtacatgtgaagatctaggctcgcctccatgttactccctttctcttcctacctgtggctcatgccatgccatgaagtgcctagggtacatatgtgaacattccagccttcagcataagtggtagtccaaattttctttaagcagctgctctccaagacagggccctggaaaggcccacacatacagcccagggctgcccagggctgttggactgtcatttcaaggctcattgtccccagacagggatctgggccctcagacttttgagaatatgaagaggagggttgaggctggagcagaaccagaatcaagctggtgtggggcttttattgatagtgtgaagattgtacactatattacatgatcagatcatacaaataatctaagattatacagtctagtgatcctagattacacaagtaatctaagcttccactttaggaaactagaaaaagaagagcaaattaaatccaaagtaacctgaaaaaacattagagtaaaaatcattgaaattgaaaagagaaaatcgataaaacccaaaactggttccttgaaaaggtcagtaaaattgataaacctctagctagcttaagaacaaacagaagacaaatattgctaataccaaaaatgaaagaggccatcacagctaatcctatggtcaccaaaaggattagaaagaaacatggacaactctgtccataaatttgataacttagctaaaatggaccaattccttgcaagacgcattctctcaaagctcacacaagatagacctcaataggcatatgtatctattaaataaaccaaagcagtaattaataaccttccaaggccaggtacagtggttcatgcctgtaatcccagcacttcactttgggaggctgaggcgggtggatcacaaggtcaggagttcgagaccagcctggtcaacatggtgaaaccccctatctactaaaaatacaaaaaattagctgggcatggtggcatgcgtgtgtagtcgaagctactcaggaggctgaggcagaagaatcacttgaacctgggaggtggatgttgcagtgagctgagattgtgccactgtactgcagcctgggtgacagaatgagactgcatctcaaaaaataataatgaaactttccaaaacaaagtgccaggaccagctgggttcactgatgtgtttttgagatacttaaggtagaaatgataccaagtctctaccatctctttcagaaaataaaagcagagataacacttcccaactcattttgtgaggccagtattaccctaatagcaaaaccaggcaaagatattacaagaaaggaaaactacagatcaatatttccattgaacacagatgcagaaatcctcaaaatattagcaaatcaggaatgcaaggcttgttcaacatttgatattcagtgtaatccattgcatgcattagcagctcaaagatgaaatacgatcatatcaataggtacagaaaaagcatttgacaaaatccaatatccattcatgttaaaacctctcaacacagaaggaatacaggagaacttactcaagttggtaaagaacatactacaaaaaaccctacagctaacattatccttgatgtttccaactagacactttcctactaagatcaggaacatggcaaggaacaccacaccactgcttttcagcattgtactggaagtgctatataatgcagtgttaaaaaaaaaagaaataaaatgcacatagatttgaaaggatgaaatacaactttgttcacaagtaacatgattgtctttgtagagaattctaaataacaaaaaccctgctgacattaataagcaattacagcaggattgcaggatacagtcctcaggtagatgataaaaaggaattggacatcaagtcattaaaagacacggagaaaccctaaatgcttattgttaagtgaaaaccaatctgaaaaggctttctattttgtatgattgcaattatatgacattttgggagaggcaaaactattgagccagtgaaaggaccagtggttgctgagagttgaggggaaaggagggatggcaggtagagaggtgatttttaaggcagtgaaagtactctctagggtactgtaatttgtcaaaacgcagagaatggaaaacagtgaacggaaaacacagagtaaaccctaatgtcaactctggacttcagttaataataatgtatcactgttggctcattaattgtaacaaatgaaccataatgatgcaagatgttaatgattggggagcctgtggaagatgggaggggaaagggttatatgagaattctctatactttttgctcaactttctgtaaccctaaagctactctaaaaaatgaagtgtatcaagtaaataaataaccaaccaacc

SEQ ID NO: 26 - protein, 811 aa, Homo sapiens
MFQVEQKSQESVSFKDVTVGFTQEEWQHLDPSQRALYRDVMLENYSNLVSVGYCVHKPEVIFRLQQGEEPWKQEEEFPSQSFPEVWTADHLKERSQENQSKHLWEVVFINNEMLTKEQGDVIGIPFNVDVSSFPSRKMFCQCDSCGMSFNTVSELVISKINYLGKKSDEFNACGKLLLNIKHDETHTQEKNEVLKNRNTLSHHEETLQHEKIQTLEHNFEYSICQETLLEKAVFNTQKRENAEENNCDYNEFGRTLCDSSSLLFHQISPSRDNHYEFSDCEKFLCVKSTLSKPHGVSMKHYDCGESGNNFRRKLCLSHLQKGDKGEKHFECNECGKAFWEKSHLTRHQRVHTGQKPFQCNECEKAFWDKSNLTKHQRSHTGEKPFECNECGKAFSHKSALTLHQRTHTGEKPYQCNACGKTFCQKSDLTKHQRTHTGLKPYECYECGKSFRVTSHLKVHQRTHTGEKPFECLECGKSFSEKSNLTQHQRIHIGDKSYECNACGKTFYHKSLLTRHQIIHTGWKPYECYECGKTFCLKSDLTVHQRTHTGQKPFACPECGKFFSHKSTLSQHYRTHTGEKPYECHECGKIFYNKSYLTKHNRTHTGEKPYECNECGKAFYQKSQLTQHQRIHIGEKPYKCNECGKAFCHKSALIVHQRTHTQEKPYKCNECGKSFCVKSGLIFHERKHTGEKPYECNECGKFFRHKSSLTVHHRAHTGEKSCQCNECGKIFYRKSELAQHQRSHTGEKPYECNTCRKTFSQKSNLIVHQRRHIGENLMNEMDIRNFQPQVSLHNASEYSHCGESPDDILNVQ

SEQ ID NO: 27 - DNA, 1996 bp, Homo sapiens
  CDS (20)..(619)
acccatccttctttcttttatgcccgcagagagagtagttaagccttcagagcagttccaggagtccatttacgggaggggggagatgagcgctgctgaggcttgggggctcaggtcccgcaccattccccctccgcgacaatctgagagagctccagtggttacttttatctacctgtccgttcaccctaaactgtcactcgtcagtctcactctgagaagagacagtaacttgaaacgttgttctaaactcctaggcccgtcccccaaacacccttttgactgggacccccgcccctgcatgggacctcgcgcagaggggggtgtgtatgtgtgtgagtgtagaggaaggcttggcctaaggcctctccttctccctccccttgcctctggggtgggggtggggtgttgtggctgtgtgtgtggctgtggctccgtcccgggggttctgtcacccggctgtgtccagcctcctctccaccccccatacctaagagtcaccaacccggggtgtgattcaccacccgctggaaccgtgcaacctttccccgaggaagaaggaggaggtagaagccagttgagcagaaatcctctcattaaccactgcgtcacggtgtagtggaagggtgggtgttgtggctttttccctgtgacacacacatccacactcgctcaccctgtgctcactcacggggtcggtgtgtgttatgtgtgttgggtgtgtgtgtgtcggtgtctttgtttgtgtgtctacgcctgtgtgtgtatgtgtcaccccgtaggagtgcgccggtctcggggaaatgcccggttccttcgtgcccacggtcaccgcgatcacaaccagccaggacctccagtggcttgtgcaacccaccctcatctcttccatggcccagtcccaggggcagccactggcctcccagcccccggtcgtcgacccctacgacatgccgggaaccagctactccacaccaggcatgagtggctacagcagtggcggagcgagtggcagtggtgggccttccaccagcggaactaccagtgggcctgggcctgcccgcccagcccgagcccggcctaggagaccccgagaggagacgctcaccccagaggaagaggagaagcgaagggtgcgccgggaacgaaataaactagcagcagctaaatgcaggaaccggcggagggagctgaccgaccgactccaggcggtgaggacaggccctggggtgggagaggggatgctgaggggagctctctccccattctctgccccctctccacctgtacccttatcctgggttgagaactagacgttctacacatggaactaggtactgctgtggccagactgggtagcccagggcacaaacacagacccccatggacttaagtcaactcctggtccccccccccatttcctgaccccacggactactctcctagccttcatttcatcccgaggggccacatggggcccttgaggagaggggcgcccccatcatttctcccatctggtcttcagcaagtaacaacccattttgcctcagtttctccatctctgcaaaccctcatcaaatctcccgggctctttctacccttaacactctggaaagcctgtgaaatgaaattattccacctcctgccctagccacccacagctctcctggtgctggtggcatcccccaaaacccactcccttcctacgtcctcccttggtctgagagttccctgctgtatgcctgcagggtgagctgttactccttgagggaacaagggaattgtcaactttccttctctactttttctcttccccgggaggtagagagggaggggtaatagaagggaacacattaaaaacacataacagtggctcatgcctgtgatcccagcactttgagaggccaaggcaggaggattgcttgagcccaggagtttgagaccagcctgggaaacatagggaggacttgtctctaccaaaaaaaaaaaaaaaaaa

SEQ ID NO: 28 - protein, 199 aa, Homo sapiens
MPAERVVKPSEQFQESIYGRGEMSAAEAWGLRSRTIPPPRQSERAPVVTFIYLSVHPKLSLVSLTLRRDSNLKRCSKLLGPSPKHPFDWDPRPCMGPRAEGGVYVCECRGRLGLRPLLLPPLASGVGVGCCGCVCGCGSVPGVLSPGCVQPPLHPPYLRVTNPGCDSPPAGTVQPFPEEEGGGRSQLSRNPLINHCVTV

SEQ ID NO: 29 - DNA, 3632 bp, Homo sapiens
  CDS (594)..(1307)
cattcataagactcagagctacggccacggcagggacacgcggaaccaagacttggaaacttgattgttgtggttcttcttgggggttatgaaatttcattaatcttttttttttccggggagaaagtttttggaaagattcttccagatatttcttcattttcttttggaggaccgacttactttttttggtcttctttattactcccctccccccgtgggacccgccggacgcgtggaggagaccgtagctgaagctgattctgtacagcgggacagcgctttctgcccctgggggagcaacccctccctcgcccctgggtcctacggagcctgcactttcaagaggtacagcggcatcctgtgggggcctgggcaccgcaggaagactgcacagaaactttgccattgttggaacgggacgttgctccttccccgagcttccccggacagcgtactttgaggactcgctcagctcaccggggactcccacggctcaccccggacttgcaccttacttccccaacccggccatagccttggcttcccggcgacctcagcgtggtcacaggggcccccctgtgcccagggaaatgtttcaggctttccccggagactacgactccggctcccggtgcagctcctcaccctctgccgagtctcaatatctgtcttcggtggactccttcggcagtccacccaccgccgcggcctcccaggagtgcgccggtctcggggaaatgcccggttccttcgtgcccacggtcaccgcgatcacaaccagccaggacctccagtggcttgtgcaacccaccctcatctcttccatggcccagtcccaggggcagccactggcctcccagcccccggtcgtcgacccctacgacatgccgggaaccagctactccacaccaggcatgagtggctacagcagtggcggagcgagtggcagtggtgggccttccaccagcggaactaccagtgggcctgggcctgcccgcccagcccgagcccggcctaggagaccccgagaggagacgctcaccccagaggaagaggagaagcgaagggtgcgccgggaacgaaataaactagcagcagctaaatgcaggaaccggcggagggagctgaccgaccgactccaggcggagacagatcagttggaggaagaaaaagcagagctggagtcggagatcgccgagctccaaaaggagaaggaacgtctggagtttgtgctggtggcccacaaaccgggctgcaagatcccctacgaagaggggcccgggccgggcccgctggcggagtgaagttcaagtcctcggcgaccccttccccgttgttaacccttcgtacacttcttcgtttgtcctcacctgcccggaggtctccgcgttcgccggcgcccaacgcaccagcggcagtgaccagccttccgatcccctgaactcgccctccctcctcgctcggtgaactctttagacacacaaaacaaacaaacacatgggggagagagacttggaagaggaggaggaggaggagaaggaggagagagaggggaagagacaaagtgggtgtgtggcctccctggctcctccgtctgaccctctgcggccactgcgccactgccatcggacaggaggattccttgtgttttgtcctgcctcttgtttctgtgccccggcgaggccggagagctggtgactttggggacagggggtgggaaggggatggacacccccagctgactgttggctctctgacgtcaacccaagctctggggatgggtggggaggggggcgggtgacgcccaccttcgggagtcctgtgtgaggatgaagggacgggggtgggaggtaggctgtggggtgggctggagtcctctccagagaggctcaacaaggaaaaatgccactccctacccaatgtctcccacacccaccctttttttggggtgcccaggttggtttcccctgcactcccgaccttagcttattgatcccacatttccatggtgtgagatcctctttactctgggcagaagtgagcccccccttaaagggaattcgatgcccccctagaataatctcatccccccacccgacttcttttgaaatgtgaacgtccttccttgactgtctagccactccctcccagaaaaactggctctgattggaatttctggcctcctaaggctccccaccccgaaatcagcccccagccttgtttctgatgacagtgttatcccaagaccctgccccctgccagccgaccctcctggccttcctcgttgggccgctctgatttcaggcagcaggggctgctgtgatgccgtcctgctggagtgatttatactgtgaaatgagttggccagattgtggggtgcagctgggtggggcagcacacctctggggggataatgtccccactcccgaaagcctttcctcggtctcccttccgtccatcccccttcttcctcccctcaacagtgagttagactcaagggggtgacagaaccgagaagggggtgacagtcctccatccacgtggcctctctctctctcctcaggaccctcagccctggcctttttctttaaggtcccccgaccaatccccagcctaggacgccaacttctcccaccccttggcccctcacatcctctccaggaaggcagtgaggggctgtgacatttttccggagaagatttcagagctgaggctttggtacccccaaacccccaatatttggactggcagactcaaggggctggaatctcatgattccatgcccgagtccgcccatccctgaccatggttttggctctcccaccccgccgttccctgcgcttcatctcatgaggatttctttatgaggcaaatttatattttttaatatcggggggtggaccacgccgccctccatccgtgctgcatgaaaaacattccacgtgccccttgtcgcgcgtctcccatcctgatcccagacccattccttagctatttatccctttcctggtttccgaaaggcaattatatctattatgtataagtaaatatattatatatggatgtgtgtgtgtgcgtgcgcgtgagtgtgtgagcgcttctgcagcctcggcctaggtcacgttggccctcaaagcgagccgttgaattggaaactgcttctagaaactctggctcagcctgtctcgggctgacccttttctgatcgtctcggcccctctgattgttcccgatggtctctctccctctgtcttttctcctccgcctgtgtccatctgaccgttttcacttgtctcctttctgactgtccctgccaatgctccagctgtcgtctgactctgggttcgttggggacatgagattttattttttgtgagtgagactgagggatcgtagatttttacaatctgtatctttgacaattctgggtgcgagtgtgagagtgtgagcagggcttgctcctgccaaccacaattcaatgaatccccgacccccctaccccatgctgtacttgtggttctctttttgtattttgcatctgaccccggggggctgggacagattggcaatgggccgtcccctctccccttggttctgcactgttgccaataaaaagctcttaaaaacgc

SEQ ID NO: 30 - protein, 237 aa, Homo sapiens
MFQAFPGDYDSGSRCSSSPSAESQYLSSVDSFGSPPTAAASQECAGLGEMPGSFVPTVTAITTSQDLQWLVQPTLISSMAQSQGQPLASQPPVVDPYDMPGTSYSTPGMSGYSSGGASGSGGPSTSGTTSGPGPARPARARPRRPREETLTPEEEEKRRVRRERNKLAAAKCRNRRRELTDRLQAETDQLEEEKAELESEIAELQKEKERLEFVLVAHKPGCKIPYEEGPGPGPLAE

SEQ ID NO: 31 - DNA, 2669 bp, Homo sapiens
  CDS (314)..(1828)
ggccacgttcagcggacacgggagcaagatggcgattccgggcaggcagtatgggcttattttgccaaagaaaacacagcagttgcaccctgttttgcaaaaaccatcagtgtttgggaatgattctgatgatgatgatgagatggggtttcactcttgttgcccaggctggagtgcaatggtgcaatctcggctcaccgcaacctccacctcctgggttcaagcgattttcctgcctcagcctcccaaatagctgcaattacagacctctgtgagtgaaagccttcagagggaagctgctaagaagcaggccatgaaacagaccaaactggaaatccagaaggcccttgcagaagatgctactgtgtatgaatatgacagtatttatgatgaaatgcagaaaaaaaaggaggaaaataatcccaaattgcttttggggaaagacagaaagcccaagtatattcacaacttgctaaaagcagttgagatcagaaaaaaggaacaggaaaaaagaatggaaaagaaaatacagagagaacgagaaatggaaaagggggagtttgatgataaagaagcatttgtgacatctgcatataagaaaaaactgcaagagagagctgaagaagaagaaagagaaaagagggctgctgcactggaagcatgtttggatgtaaccaagcagaaagatctcagtggattttataggcacctattaaatcaagcagttggtgaaaaggaagtacctaaatgcagctttcgtgaagccagatctggtataaaggaagaaaaatcaaggggcttctccaatgaagtaagttcaaaaaacagaataccacaagagaaatgcattcttcaaactgatgtgaaagtagaggaaaacccagatgcagacagtgacttcgatgctaagagcagtgcggatgatgaaatagaagaaactagagtgaactgcagaagggaaaaggtcatagagacccctgagaatgacttcaagcaccacaggagtcaaaaccactctcggtcacctagtgaagaaagagggcacagtaccaggcaccacacgaaaggatcacgaacgtcgagaggacatgagaaaagggaagatcagcaccagcagaagcaatccagagaccaagagaaccattacactgaccgtgattaccggaaagaaagggattctcataggcacagagaggccagtcatagagattcccattggaagaggcatgaacaggaagataaaccaagggcgagggaccaaagagaaagaagtgacagagtatggaaaagggagaaagatagggagaaatattcccaaagagaacaagaaagagatagacaacaaaatgatcagaaccgacccagtgagaaaggagagaaggaagagaaaagcaaagcaaaggaagagcatatgaaagtaaggaaggaaagatatgaaaataatgataaatacagagatagagaaaaacgagaggtaggtgttcagtcttcagaaagaaatcaagacagaaaggaaagcagcccaaattctagggcaaaggataaatttcttgaccaagaaagatccaacaaaatgagaaacatggcaaaggacaaagaaagaaaccaagagaaaccctctaattctgaatcatcactgggagcaaaacacagactcacagaggaagggcaagagaagggtaaagaacaagagagaccacctgaggcagtgagcaagtttgcaaagcggaacaatgaagaaactgtaatgtcagctagagacaggtacttggccaggcagatggcgcgggttaatgcaaagacctatattgagaaagaagatgattgatggctaccccaagagaaagatttaaggaagcacagaaaactgtaattcctggaacctgctgcgtaaaaccataaaggagtgtgttaccagtagtttggagggcatttttaaatttattttcaaaattttaagttaaaagtcagtcttacagcttggatgtttggatgtggatgtttggctgaatttatatatagtgtgtactcatcaataccacattctttgttgtattcaagaaccgttaagagtgtgctaattccctgtaggtacataatgaggaaaatttgctccactacaaccattaaaaaataattttggccagatacggtagctcgtgcctgtaataccaacattttgggaggccaaggcagaaggatattgaggctaggcattcaagaccagcctaggcaggataataagaccttgtctctatttaaaaaacaaaaagcctagcatggtagtccatgcctgtagtcccagctgttcgagaggctgaggcaagaagatcacttgagcctaggaatttgatgttacagtgaggtatgatcatgccactgcactccaacctgggcaacagaatgagaccctgtctctaaaaaattttttttaaataaataatttaactcttctaataatgttttgttgcaggaaatgtatttcagataaaatatggatttgaaaaacagaaaatatactttatgttctgaaatttgtatttaagtataaaatgtgaatcatcttgtctaaatagcttacagcatagttggcttaaatgaaaataaaatgatatgcttatacatttggaaaaaaaaaaaaaaaaaaaaaaaaaaaaaaaaaaaaaaaa

SEQ ID NO: 32 - protein, 504 aa, Homo sapiens
MKQTKLEIQKALAEDATVYEYDSIYDEMQKKKEENNPKLLLGKDRKPKYIHNLLKAVEIRKKEQEKRMEKKIQREREMEKGEFDDKEAFVTSAYKKKLQERAEEEEREKRAAALEACLDVTKQKDLSGFYRHLLNQAVGEKEVPKCSFREARSGIKEEKSRGFSNEVSSKNRIPQEKCILQTDVKVEENPDADSDFDAKSSADDEIEETRVNCRREKVIETPENDFKHHRSQNHSRSPSEERGHSTRHHTKGSRTSRGHEKREDQHQQKQSRDQENHYTDRDYRKERDSHRHREASHRDSHWKRHEQEDKPRARDQRERSDRVWKREKDREKYSQREQERDRQQNDQNRPSEKGEKEEKSKAKEEHMKVRKERYENNDKYRDREKREVGVQSSERNQDRKESSPNSRAKDKFLDQERSNKMRNMAKDKERNQEKPSNSESSLGAKHRLTEEGQEKGKEQERPPEAVSKFAKRNNEETVMSARDRYLARQMARVNAKTYIEKEDD

SEQ ID NO: 33 - DNA, 1230 bp, Homo sapiens
  CDS (103)..(678)
ccacctcctacctgccgggcgggacgagcaacatgattggtggaatcgagtaattactgatcagtattgtccaatcacggagggcagtttagagccggcccaatgagggcctccaggggcgggtcggactgccgcgggccggggagcgctctgggtggccagctgtgggcccgggccgtcgtgggctccggcttgcgtgcggagatgagcgggtccctcggccgagctgcggcggctctgctccgctgggggcgcggcgcgggcggcggtggcctttggggtccgggcgtgcgggcggcgggctcgggcgcgggcggcggcggctcggcggagcagttggacgcgctggtgaagaaggacaaggtggtggtcttcctcaaggggacgccggagcagccccagtgcggcttcagcaacgccgtggtgcagatcctgcggctgcacggcgtccgcgattacgcggcctacaacgtgctggacgacccggagctccgacaaggcattaaagactattccaactggcccaccatcccgcaagtgtacctcaatggcgagtttgtagggggctgtgacattcttctgcagatgcaccagaatggggacttggtggaagaactgaaaaagctggggatccactccgcccttttagatgaaaagaaagaccaagactccaagtgagggcggccaagtcctcgctgagcagagagggagccgttcatgtcagagactcactgccagaaaagccttacccattttggttttcactattgagaccgcaactgcttgcactgatcattttggttcatgagcagttggtgattttagttggtctggtgttcgggctaagaatattttattgtggacttaattacaaccactgcactgtaatgattcaatgctgtattatgatattgctgtaaacaaaattcattcttatattgtcacttattctttgcctgattcagaagttaaataggagctttggaatcattattcatgacccctctgcaaatgtgtcagtctccaaagagagtatctccccccaaattttgtgtagcttcttttgttatggaaaatggtggacaaaaaaagaaactgtgataactggggcgttgttttttaaaataaactccagcacagggatgctgtgcatgcctgagttgattccgaaaaaaaaaaaaaaaaaaaaaaaaaaaaaaaaaaaaaaaaaaaaaaaaaaaaaaaaaaaaa

SEQ ID NO: 34 - protein, 191 aa, Homo sapiens
MRASRGGSDCRGPGSALGGQLWARAVVGSGLRAEMSGSLGRAAAALLRWGRGAGGGGLWGPGVRAAGSGAGGGGSAEQLDALVKKDKVVVFLKGTPEQPQCGFSNAVVQILRLHGVRDYAAYNVLDDPELRQGIKDYSNWPTIPQVYLNGEFVGGCDILLQMHQNGDLVEELKKLGIHSALLDEKKDQDSK

SEQ ID NO: 35 - DNA, 2492 bp, Homo sapiens
  CDS (306)..(1409)
agcactcccgccctagcaacgtgcgcctgctgctaggggcggaggcgcgggagggctcggaggctgttcccacccccaggctccgcgttcccgccggccccagctccagccccgcagcccaccgtgcaaacatgcttagacagagaagagattaacttcagtggcttcccactaattacagagattaagaagtggctgcctgaactattttccaaaggatacacattacaaattattgaatagggcagctaaccaagaagatcctattggtttggggggaacacaacttccagcagccacaagggatgctgctactcaggtgccaactgaaacaagctcctccacagaaggtttcgtttaggttttgtgtcgtgatggggaaacagcaaagcaaactcaaacacagcacttataaatacggcaggcctgatgaaattatagaagagagaattcaaactaaagcttttcaagagtatagcccagctcacatggataccgtctctgtcgtggctgctttgaactcagacctttgtgtctctggagggaaagataagacagttgtggcctataattggaaaactggaaatgtggtgaaaaggttcaaaggacatgaacatgagatcaccaaggtagcctgtattcccaaatccagccagttcttcagtgcctctcgtgacaggatggtcatgatgtgggacttgcacggttcctcacaaccaaggcagcaattgtgtggccatgccatggtggtcaccggattggctgtgagtccagactcatcacagctgtgcactggctctcgggacaacaccctgcttctgtgggatgtggtgacaggacagagtgtggaaagagcatctgtctccaggaacgtggtcactcacctgtgctgggtccccagagaaccatacatactacagacctctgaagataaaaccctcagattatgggacagtcgggggctgcaggtagctcatatgtttcctgcaaagcagcacattcagacctactgtgaagtcagtgtggatggacacaagtgtatctcctgcagcaatggctttggaggagaaggctgtgaagccacgttgtgggacctaagacagactcgaaacagaatatgtgagtataaggggcatttccagactgtcgcatcctgcgtctttctaccaagagcattggccttgatgcctttaattgctacctcatcacatgattgcaaggtgaagatttggaaccaagatactggagcctgccttttcaccttgtctctggatggatcaggacccttgacttctctggctgttggtgacgccatctccttattgtgtgcaagttttaacagaggaattcacttactcagaatggaccacagccaagggctggaactgcaggaagtggcagcattctgaggccaagagacactcactggacaatatcaaaccatggctcctcctcagcatggctttgtgtctttcccagttatcttgaggggagtgggatgtagggctggtattctttgcttaggttcatttacaagatgtatcagtgttgtaagtccaataatttaagtccagtgattcaaaatcaggtatagagtccagaaacatggactacacataaggttctctatttaagttaaatacaaatgcaactttttagtgagcttttaggactactcttcaaaaaaagtgtattgctcagaatgatgacctgtaaatgtaagagtggcaggcctctgtctgtgaaagtcagaacacagggctcgagcctctggaactgaccctttgcaagtctttacaaaagaaaaaaggcagtggggagagagagtgttttggttacatcagaaataattgagatgggaaagaatagtgcagctccatagaggagacggactgtagacaatgagattaagcttcaatcactgctcctcagcaatgtgaagaatcaaagtcagggcaagaaagcgaaagcttggacttctattcaaagtggcagcagagtgggagggcggtacccttctagcccagtgctgctgagcttgtgtgaaaatcagacctgagatggcttgaagcagccaagaaccacatgggcattgcccagaattacaggagttagcacaccagctctacagataagaaaacattgaaattcaaagattaaggccaaaaatatctcacttgcaattttaatattttcatttggatttatataaatgaaacatatatatgttttggaatggccagagtgaggcaaaggggatccctgaaataacattagaacatacaggaaaaacgaggcaggcagatcactttaggtcaggagttcaagaccagcctgtacgtgcgtgcctgtagtcccagctactcgggagggtgagatgggagaatcacttgaacctgggaggcagagtttgcagtgagctgagattgtgccactgcactccagtctgtgtgacagaatgagaccttgtcttgaaaaaaaaaaaaaaaaaa

SEQ ID NO: 36 - protein, 367 aa, Homo sapiens
MLLLRCQLKQAPPQKVSFRFCVVMGKQQSKLKHSTYKYGRPDEIIEERIQTKAFQEYSPAHMDTVSVVAALNSDLCVSGGKDKTVVAYNWKTGNVVKRFKGHEHEITKVACIPKSSQFFSASRDRMVMMWDLHGSSQPRQQLCGHAMVVTGLAVSPDSSQLCTGSRDNTLLLWDVVTGQSVERASVSRNVVTHLCWVPREPYILQTSEDKTLRLWDSRGLQVAHMFPAKQHIQTYCEVSVDGHKCISCSNGFGGEGCEATLWDLRQTRNRICEYKGHFQTVASCVFLPRALALMPLIATSSHDCKVKIWNQDTGACLFTLSLDGSGPLTSLAVGDAISLLCASFNRGIHLLRMDHSQGLELQEVAAF

SEQ ID NO: 37 - DNA, 3288 bp, Homo sapiens
  CDS (267)..(653)
gaagtgtttggtgcacaaactgaattttgaaatatttaaattttctttcatttgcttacagctatttgtacagtttattgtaagataagaatgaaaatcaggtgttaaagcaaagagtacaaaactattctatgtcctgtctcttttcagttgcttctccaagcattagacttctctaggcaaagtcctttcataacactagagattcattatatttggtagttcatgaaattttaacaagacacacttctgtttgtgggattggaatgcgtgttggtgagtgtccgaatttaaatatattggtattcatatggattcaggatttattttcaaagaacagatattcactagaccaaactaacctgtactcaaacttgaaagaaatagaaatagaaaaagcagaggataactttgtagagttaattcctgatatactggtctctaaagtttcttgttgtccgataaatattaatttagcacctgctgggtttcaggcaggaactgtggaagaacttataaagggtatgaaaatgagtatatcaagatttctgtactcaagttatatacagttagctgtaggtgataagacaggtatggtgacagctaaaatacaatcagacttccataaaagaggtgaagggagacgagaatgattatgattgtttaaagaggaacagatcacatggtgttgagaaaaccgacttagttgtcccaaaaggttttctgagcttgtttcggaaaggaagactggacttttagcaggtgaatatgacagcatgaagggtaagccaatatagaagaaacaatgtaagattacaaggggcattttcaggatataggaaagagaaaagcttgatgaaaagttaggtatagtatagtatggggagctaagacttgacataaaggttaggataattttctaaaatgtttatttgaaaaactttatctcagaaggaaatagggaaccattccaggatttgggcaaaggataatttgatgaaacctttaatagggttaatatgaccatcttacataggttgacatggaaaggaggtggacggggttgaggtgacgaagactcattagtaggctgatctcttactctatgagtaataacagggagcctacactaggataatgatgttgggaagtgatttctgtagctatgctgagcagacagtcttcaagagttagcaaagtttatatgtgcgggtgacaaaaaagaggctttgagttttgatgactgaaaggagacaaataatagctaatctttgataaagactaactatgggcaaggctttactctttgtttgtagtaacttacttaatcctcattataacccctttatatagatgctgtattttctccattttacagagaggaagtagagcctcagagatgttatgtcacttgtcaaaagtcacccagctagtgaatggctggatcaaactggatcatgtccaagtagcctgggcaacagagcgagactgtctcaaaaaagagaaaaaaaagaaaaaaaaaaagaaagcctgagagaattgggttttatggttacaaataaattttaggccagtttacaagtgcagaatctctaaatagtgaggattggctatatgtgttttctcaaatatcagttcttttcgtgtgccttggtctttatcttctgcgccacttgtttttcttgggtgtctgctgatctttgcttatttatatttatgagtgagtgactgttactgctattagagcaaactggtattggcatttttctcctgctgggtgctctgttgtgttaacaacttactctcttaactagggaggctgactgaattttgtggaatgggtggagtgggttgacagggtttcctaaggatgtgtgagccaagagcaggctggggcaccctccaactgacaaagcaagaaagattttccgttgagcacgatgaaccattggggcgcagttccttcctccctgcccctttccctgttggttttggagtgctcctttatttccagctcttaccttttctttttcaagttctaattgtctcactaagacaatgttttttgaccaaatcactccatgattgtccgtgactcatttatattctttgcatttattaattggaggttggaccttctggaattttctacttactgatggtgatacggactcttttttcctttgtattttctttctcagtctgatctgcttcctgacttcctggaaaccctccaaatttcttgatttctaatggcactctttctagatttctagccctgtacgataatattctttcatcatttcagtgggcttttggagggaggcggagatccaggtgatatgtctacactattcagtcagaaagctggatggtttttctcactgtttagctgtgactcatacttagaaagtggtttaaatgtgaatatcttagttctggttgtacaattgaggtaatcctcaattcaggttgctgtctggacatttcatgactggatttaaaaatatttttaaggccaggtggggtggctcacgtaattccagcactttgaaaggctgaggcgggcagatcacctaaggtcgggagttcgagaccagtctgaccaacatggagaaaacccctctctactaaaaatacaaaattagctgggtttggtggcacatgcctgtaatgctagctactcaggaggctgaggcaggagaatcattgaacctgggaggtggaggttgcggtgagctgaaatcacgccattgcactccaccctgggcatcaagagcaaaactctgtacccgcccccccccccccccccacctcaccaaaaagaaaaaacaacaaagaatttttaaaatctcacatttttttagctgggtgtggtggtgcacacctggaatcccagctacttgggaggaggattgcttgagcccagaagttcaagtccagcctgggcaacatagtgagactccagtctcaattaaaaaaaaaaatcttggccaggcatggttgtttacgcctgtaatcccagcactttgggaggccgaggtgggcggatcatgaggtcaggagatcaagaccatcctggccaacatggtgaaaccttatctttactaaagatacaaaaattagctgggcgtggtggcgcgtgcctgtgatcccagccacttgggaggccgaggcacgagaatcgcttgaatccaggagatggaggttgcagtgagccgagatcatgccactgcactccagcctggcgacagagtgagactccatctcaaaaaaaaaaaaaaaaaa

SEQ ID NO: 38 - protein, 128 aa, Homo sapiens [sequence omitted]

SEQ ID NO: 39 - DNA, 6956 bp, Homo sapiens
  CDS (322)..(4335)
gacgaggccggaggagcttcgaggctgctcttcctcggccagacggagagcggcactgtctccccgcccagcgctcactcgccccgcgtctccccccgcggcggctgctcctcctcggcaccgccagccccagcgccgctcccgggcgggcgggcggcggcggcggcggcggcggcgggacccgcggagccgctttgtgtgcagcccgactaggggcggcggcgcaaccacctgacagaggcccgggcgctcgatgcaccttccgcccgcatgaggaggagaggccggtagaggactgtgaaccaaaagttgtcccccaggatggacttcaccgcgcagcccaagcctgccactgccctctgtggcgtcgtgagtgccgacgggaagatcgcttaccctccgggggtaaaagagatcaccgacaagatcaccacggacgagatgatcaaacgcctgaagatggtagtgaaaacctttatggatatggatcaggactcagaagatgaaaaacagcagtatctcccactagccttgcatcttgcatctgaattcttcctcaggaaccccaataaagatgtgcgtctccttgtagcatgttgtttggctgatatctttcgtatctatgccccagaagctccatatacttcccatgataaacttaaggacatatttttgtttattaccagacaattaaaaggtttggaggatacaaagagtccacagtttaatagatacttttatttattagagaatttagcttgggttaaatcatataacatctgctttgaattggaagattgcaatgaaatttttattcagctttttagaactctcttctcagtgatcaacaatagccacaataagaaggtacaaatgcacatgctagatttgatgagttctatcatcatggaaggtgatggagttactcaagaattattggactccattcttattaacctcattcctgcacataagaacttaaataaacagtcctttgaccttgcaaaagtgctattgaaaagaacagtccagactattgaggcatgcattgctaattttttcaatcaagtcctggtgctgggaagatcatcagtaagtgatttgtcagaacatgtatttgatctgattcaggaactttttgctatagatcctcatttattattatccgtcatgccacagcttgaattcaaactaaagagcaatgatggagaagagcgattagctgttgttcgacttctagctaaattgtttggctccaaagattctgatttggcaacacagaatcgtcctctttggcaatgttttcttggacgatttaatgatattcatgttcctgtgagattagaaagtgtgaaatttgccagtcattgtttaatgaatcacccagatttagcgaaggatctcacagaatatttaaaggttagatcacatgatccagaagaagctattcgtcatgatgtcattgttactataataacagctgccaagagggacctggccttagtaaatgatcagctgcttggctttgtaagggaaagaacactggataaacggtggcgagtaagaaaagaagctatgatgggtctggctcagctttataagaaatactgtcttcatggtgaagcaggaaaggaagctgcagagaaagtcagctggataaaggacaaacttctgcatatttattatcagaacagcattgacgacaaactgttggtagagaaaatctttgctcagtatcttgtcccccacaacctggaaacagaagagagaatgaaatgcttatattacttatatgctagtttggatccaaatgctgtaaaagctctcaacgaaatgtggaagtgtcagaacatgcttcggagccatgtacgcgaactattggatttgcacaagcagcctacatcagaggctaactgttctgccatgtttggaaaactgatgaccatagcaaagaatttgcctgaccccgggaaagcacaagattttgtgaagaaatttaaccaggttctcggcgatgatgagaaacttcggtctcagttggagttattaattagcccaacctgttcttgcaaacaagcagatatttgtgtgagagaaatagcccggaaacttgcaaatcctaagcaaccaacaaatccttttctagagatggtcaaatttctgttggaaagaatcgcacctgtgcacattgattcagaagccataagtgcactagtgaaattgatgaataagtcaatagaggggacagcagatgatgaagaggagggtgtaagtccagatacagctatccgttcaggacttgaacttcttaaggttctgtcttttacacatcctacctcgttccactctgcagagacatatgagtccttgttacagtgcctaagaatggaggatgacaaggtagcagaagctgctattcaaatttttagaaatacaggtcacaaaatagaaacagaccttccccagatacgatcgaccttaattcccattttacatcaaaaagcaaagaggggtactccacaccaagcaaaacaggctgtgcactgtatacacgccatattcacaaataaagaagtccagcttgcacagatttttgagccactcagtaggagtctgaatgctgatgtgccagaacaacttataactccattagtttcattgggccacatttctatgttagcaccagatcagtttgcttccccaatgaaatctgtagtagcaaattttattgtgaaagatctgctaatgaatgacaggtcaacaggtgaaaagaatggaaaactgtggtctccagatgaagaggtttcccctgaagtactagcaaaggtacaggcaattaaacttctggtaaggtggctgttgggtatgaaaaacaaccagtctaaatctgccaattcaacccttcggttattatcagcgatgttggttagtgagggtgacctgacagagcaaaagaggatcagtaaatctgatatgtctcgcttgcgattagctgctggtagtgccataatgaagcttgctcaggaaccttgttaccatgaaattattaccccagaacagtttcagctctgtgcacttgttattaatgatgagtgttaccaagtaaggcagatatttgctcagaagctgcataaggcacttgtgaagttactgctcccattggagtatatggcgatctttgccttgtgtgccaaagatcctgtgaaggagagaagagcacacgcacgacaatgtttactgaaaaatatcagtatacgcagggaatacattaagcagaatcctatggctactgagaaattattatcactgttgcctgaatatgtagttccatacatgattcacctgctagcccatgatccagattttacaagatcacaagatgttgatcagcttcgtgatatcaaagagtgcctatggttcatgcttgaagttttaatgacaaagaatgaaaacaatagccatgcctttatgaagaagatggcagagaacatcaagttaaccagagatgcccagtctccagatgaatccaagacaaatgaaaaactgtatacagtatgtgatgtggctctctgtgttataaatagtaaaagtgctttgtgcaatgcagattcaccaaaggacccagtcctcccaatgaaattttttacacaacctgaaaaggacttctgtaacgataagagttatatttcagaagagacaagagtacttctgttaacaggaaagccaaagcctgctggagtactaggtgcagtaaataagcctttatcagcaacgggaaggaaaccctatgttagaagcactggcactgagactggaagcaatattaatgtaaattcagagctgaacccttcaaccggaaatcgatcaagggaacagagttcagaggcagcagaaactggagttagtgaaaatgaagagaaccctgtgaggattatttcagtcacacctgtaaagaatattgacccagtaaagaataaggaaattaattctgatcaggctacccagggcaacatcagcagtgaccgaggaaagaaaagaacagtaacagcagctggtgcagagaatatccaacaaaaaacagatgagaaagtagatgaatcgggacctcccgccccttccaaacccaggagaggacgtcgacccaagtctgaatctcagggcaatgctaccaaaaatgatgatctaaataaacctattaacaagggaaggaagagagctgcagtgggtcaggagagccctgggggtttggaagcaggtaatgccaaagcacccaaactgcaagatttagccaaaaaggcagcaccagcagaaagacaaattgacttacaaaggtaaaaatgcatttgcaaagggagaaaatgaaggccaaacagaagcaggctccagcttctgcaaaaacttggattcacaaatgtccctgaacagaaaatgaagctcacttcagaacacacactctctgccttgaaaactaaagagactattacttccttttcacatgaccacaagtcctctgatggaaatgtacagcagaaactcttgagagagaggctaaaagcaactctgttctcccccttcccctagacttttcttacgaaaagtcaataattaagcaaattgcttaacacttggttccagttcctgcctatctggagtttaaatgcgtaatacaccattaatttccacgctgcagtttttattttaaagaaagtaacaagatgtctttacactgacactgaaaattcatccattttagagccaggaattcccatgttacacaggaaaaaatagaagtctactgaattaattttttaaaagaaaagagatcagattaaatatttctttgtttttccttttggaaacttttatgtataattctttctgcctgcctacttttctgcaaaaatgagatgtacagatttcggttccctgctatgaaaagtgatgtggtagcaattttataaatgttgctttctgatttttatcagagtgagaaaattaaaattattgatttgcaagtagtaaacagttcatattttgatttcccctcattttagtttaatataatttgcaataaatgtacatattgttgtttgtttcataaagcatatcactttaaaatggtttttactcctgtgattatgttggaatatttggaattttaaaggagtaaagactgtccagcatttggttttataatgtttgtcaccagatttttattaatgtaaaaaaaatcaatttttaaaaaatagttggactttggcagcttttaaggaaagttggaggtgttttaggattgctatcaattttcagcattgtgctatttggaaataagtgttttgcttttgtctgatggtctgggctcatttttatgtttattttagaaaactgttgcatcaatatattatgtttcttggcattgttcagcataggtaatgtgtgcactttatgtgtacacataatcatatttaagttttttgcataaaataaatgcttctagatgtcatggcagtctttttaatctttttatcatatgctttcttgtgaattttttcatgttaaagagctaaagtcataacatgattacagtcaactctccattatctatataaaatagtgactaagcctcaggtttttaattttgtgataacaaaataacgaaggcatgtaagacctgattctggaggaacatgaaatttgtcttttctcatgtccagagttctatcctgcccccactgtccactgtagggtcatccgcaaagccctagcagaatgtgctcactccatttccttacacgtttctagcatgggtcagaggaaacaacatttgtgttataacttcgtcttgataggctgtagtgtacatgggatgtaaaacaaacaagtgtatcaaaggtggatgattctgttagagtgaagtttgagagtaaatgtcacttacgtttctcatagataatcaagagttggctgtgtattgactgaaagatgggtaattattttaaatatgcatttacacacatttaggtatcagaagatgcttagggaacaatggataccaatgatagaaaatgatacctttacaggggcagaaaaatccccactcttccttattgcctcttcagaaccctttagaaagtataaaatattgcctccaacatgctgaaaaagagtatctatgcataagtatcagagaagtccctcaagcaatcagtaggtgtgttctatttagagagagtttaaagttctcttagcatcagacaacttgattcctaaggtttccagtgtgtcaccaacaaaaagtgcattgatagggacctttgtctcttcctccctttgattaattgcccggcatcacagtttactagattaccaagtgttacatcatattaaataaaatgtagcagaaccatctgcatcaatatattcctgtttagatttttgcaggagagaagttaaaaggatttgctccttgtatgatgtaagtggcccaccccaattttgtaacatgatgcaagtgtctggcactaagggaagcaagagtagggttgtggaaagaccaagctgatggggagggacttgtttacgggaatttttttagttttccttttcaaaggaaaacattaaaatcccttaggaatttggtattcacatctcagagaactacaacacaaaagtgcagacttatatttgagaattaatgttaaccctttgtgtctagtttgaagcttcttgtatttgtctaaaacaacaagccagaattttgtatctcctttgataaaaagtgtgtataatgtaaagtagttttgcatattcttgtgctgcacatgggctgaatttttaaattttttttaaaaacttgaagcagaaccttgtaatttgtgtaaatgacaagtgtaaaatcctaccataaaatgctaaaaatatgcactgtttcaaataaaaccaagaaatgcagcatt

SEQ ID NO: 40 - protein, 1337 aa, Homo sapiens
MDFTAQPKPATALCGVVSADGKIAYPPGVKEITDKITTDEMIKRLKMVVKTFMDMDQDSEDEKQQYLPLALHLASEFFLRNPNKDVRLLVACCLADIFRIYAPEAPYTSHDKLKDIFLFITRQLKGLEDTKSPQFNRYFYLLENLAWVKSYNICFELEDCNEIFIQLFRTLFSVINNSHNKKVQMHMLDLMSSIIMEGDGVTQELLDSILINLIPAHKNLNKQSFDLAKVLLKRTVQTIEACIANFFNQVLVLGRSSVSDLSEHVFDLIQELFAIDPHLLLSVMPQLEFKLKSNDGEERLAVVRLLAKLFGSKDSDLATQNRPLWQCFLGRFNDIHVPVRLESVKFASHCLMNHPDLAKDLTEYLKVRSHDPEEAIRHDVIVTIITAAKRDLALVNDQLLGFVRERTLDKRWRVRKEAMMGLAQLYKKYCLHGEAGKEAAEKVSWIKDKLLHIYYQNSIDDKLLVEKIFAQYLVPHNLETEERMKCLYYLYASLDPNAVKALNEMWKCQNMLRSHVRELLDLHKQPTSEANCSAMFGKLMTIAKNLPDPGKAQDFVKKFNQVLGDDEKLRSQLELLISPTCSCKQADICVREIARKLANPKQPTNPFLEMVKFLLERIAPVHIDSEAISALVKLMNKSIEGTADDEEEGVSPDTAIRSGLELLKVLSFTHPTSFHSAETYESLLQCLRMEDDKVAEAAIQIFRNTGHKIETDLPQIRSTLIPILHQKAKRGTPHQAKQAVHCIHAIFTNKEVQLAQIFEPLSRSLNADVPEQLITPLVSLGHISMLAPDQFASPMKSVVANFIVKDLLMNDRSTGEKNGKLWSPDEEVSPEVLAKVQAIKLLVRWLLGMKNNQSKSANSTLRLLSAMLVSEGDLTEQKRISKSDMSRLRLAAGSAIMKLAQEPCYHEIITPEQFQLCALVINDECYQVRQIFAQKLHKALVKLLLPLEYMAIFALCAKDPVKERRAHARQCLLKNISIRREYIKQNPMATEKLLSLLPEYVVPYMIHLLAHDPDFTRSQDVDQLRDIKECLWFMLEVLMTKNENNSHAFMKKMAENIKLTRDAQSPDESKTNEKLYTVCDVALCVINSKSALCNADSPKDPVLPMKFFTQPEKDFCNDKSYISEETRVLLLTGKPKPAGVLGAVNKPLSATGRKPYVRSTGTETGSNINVNSELNPSTGNRSREQSSEAAETGVSENEENPVRIISVTPVKNIDPVKNKEINSDQATQGNISSDRGKKRTVTAAGAENIQQKTDEKVDESGPPAPSKPRRGRRPKSESQGNATKNDDLNKPINKGRKRAAVGQESPGGLEAGNAKAPKLQDLAKKAAPAERQIDLQR

SEQ ID NO: 41 - DNA, 4824 bp, Homo sapiens
  CDS (27)..(3566)
ggcacgaggctcgccgcggactcaagatggcggcgtgtggacgtgtacggaggatgttccgcttgtcggcggcgctgcatctgctgctgctattcgcggccggggccgagaaactccccggccagggcgtccacagccagggccagggtcccggggccaactttgtgtccttcgtagggcaggccggaggcggcggcccggcgggtcagcagctgccccagctgcctcagtcatcgcagcttcagcagcaacagcagcagcagcaacagcaacagcagcctcagccgccgcagccgcctttcccggcgggtgggcctccggcccggcggggaggagcgggggctggtgggggctggaagctggcggaggaagagtcctgcagggaggacgtgacccgcgtgtgccctaagcacacctggagcaacaacctggcggtgctcgagtgcctgcaggatgtgagggagcctgaaaatgaaatttcttcagactgcaatcatttgttgtggaattataagctgaacctaactacagatcccaaatttgaatctgtggccagagaggtttgcaaatctactataacagagattaaagaatgtgctgatgaaccggttggaaaaggttacatggtttcctgcttagtggatcaccgaggcaacatcactgagtatcagtgtcaccagtacattaccaagatgacgggcatcatttttagtgattaccgtttaatctgtggcttcatggatgactgcaaaaatgacatcaacattctgaaatgtggcagtattcggcttggagaaaaggatgcacattcacaaggtgaggtggtatcatgcttggagaaaggcctggtgaaagaagcagaagaaagagaacccaagattcaagtttctgaactctgcaagaaagccattctccgggtggctgagctgtcatcggatgactttcacttagaccggcatttatattttgcttgccgagatgatcgggagcgtttttgtgaaaatacacaagctggtgagggcagagtgtataagtgcctctttaaccataaatttgaagaatccatgagtgaaaagtgtcgagaagcacttacaacccgccaaaagctgattgcccaggattataaagtcagttattcattggccaaatcctgtaaaagtgacttgaagaaataccggtgcaatgtggaaaaccttccgcgatcgcgtgaagccaggctctcctacttgttaatgtgcctggagtcagctgtacacagagggcgacaagtcagcagtgagtgccagggggagatgctggattaccgacgcatgttgatggaagacttttctctgagccctgagatcatcctaagctgtcggggggagattgaacaccattgttccggattacatcgaaaagggcggaccctacactgtctgatgaaagtagttcgaggggagaaggggaaccttggaatgaactgccagcaggcgcttcaaacactgattcaggagactgaccctggtgcagattaccgcattgatcgagctttgaatgaagcttgtgaatctgtaatccagacagcctgcaaacatataagatctggagacccaatgatcttgtcgtgcctgatggaacatttatacacagagaagatggtagaagactgtgaacaccgtctcttagagctgcagtatttcatctcccgggattggaagctggaccctgtcctgtaccgcaagtgccagggagacgcttctcgtctttgccacacccacggttggaatgagaccagtgaatttatgcctcagggagctgtgttctcttgtttatacagacacgcctaccgcactgaggaacagggaaggaggctctcacgggagtgccgagctgaagtccaaaggatcctacaccagcgtgccatggatgtcaagctggatcctgccctccaggataagtgcctgattgatctgggaaaatggtgcagtgagaaaacagagactggacaggagctggagtgccttcaggaccatctggatgacttggtggtggagtgtagagatatagttggcaacctcactgagttagaatcagaggatattcaaatagaagccttgctgatgagagcctgtgagcccataattcagaacttctgccacgatgtggcagataaccagatagactctggggacctgatggagtgtctgatacagaacaaacaccagaaggacatgaacgagaagtgtgccatcggagttacccacttccagctggtgcagatgaaggattttcggttttcttacaagtttaaaatggcctgcaaggaggacgtgttgaagctttgcccaaacataaaaaagaaggtggacgtggtgatctgcctgagcacgaccgtgcgcaatgacactctgcaggaagccaaggagcacagggtgtccctgaagtgccgcaggcagctccgtgtggaggagctggagatgacggaggacatccgcttggagccagatctatacgaagcctgcaagagtgacatcaaaaacttctgttccgctgtgcaatatggcaacgctcagattatcgaatgtctgaaagaaaacaagaagcagctaagcacccgctgccaccaaaaagtatttaagctgcaggagacagagatgatggacccagagctagactacaccctcatgagggtctgcaagcagatgataaagaggttctgtccggaagcagattctaaaaccatgttgcagtgcttgaagcaaaataaaaacagtgaattgatggatcccaaatgcaaacagatgataaccaagcgccagatcacccagaacacagattaccgcttaaaccccatgttaagaaaagcctgtaaagctgacattcctaaattctgtcacggtatcctgactaaggccaaggatgattcagaattagaaggacaagtcatctcttgcctgaagctgagatatgctgaccagcgcctgtcttcagactgtgaagaccagatccgaatcattatccaggagtccgccctggactaccgcctggatcctcagctccagctgcactgctcagacgagatctccagtctatgtgctgaagaagcagcagcccaagagcagacaggtcaggtggaggagtgcctcaaggtcaacctgctcaagatcaaaacagaattgtgtaaaaaggaagtgctaaacatgctgaaggaaagcaaagcagacatctttgttgacccggtacttcatactgcttgtgccctggacattaaacaccactgcgcagccatcacccctggccgcgggcgtcaaatgtcctgtctcatggaagcactggaggataagcgggtgaggttacagcccgagtgcaaaaagcgcctcaatgaccggattgagatgtggagttacgcagcaaaggtggccccagcagatggcttctctgatcttgccatgcaagtaatgacgtctccatctaagaactacattctctctgtgatcagtgggagcatctgtatattgttcctgattggcctgatgtgtggacggatcaccaagcgagtgacacgagagctcaaggacaggtagagccaccttgaccaccaaaggaactacctatccagtgcccagtttgtacagccctcttgtatagcatccccactcacctcgctcttctcagaagtgacaccaaccccgtgttagagcattagcagatgtccactgcgttgtcccatccagcctccactcgtgtccatggtgtcctcctcctcctcaccgtgcagcagcagcagctggtcgctggggttactgcctttgtttggcaaacttgggtttacctgcctgtagacaagtctctctcataccaacagaacttccggtacttccagaaccaactcacctgacctgcaactcaaaggcttttttaagaaaaccaccaaaaaaaaaaatttttttaaagaaaaaaatgtatatagtaacgcatctcctccaggcttgatttgggcaatggggttatgtctttcatatgactgtgtaaaacaaagacaggacttggaggggaagcacaccacccagtgtgccatgactgaggtgtctcgttcatctctcagaagcaccttggggcctcgccagggccgtggtcttcaccgaggcgtgggtgggcagccgttccccaggctgtgtggggtcctgctttcttctgctgagacagtgacgctttccagtttccaccctaatcagccactgctggtcacagccccacagccatgggtatttctgtggtctcctcgcttcattgaagcaaagcatgagccttcctagacaagggcagctggggaggggaagggaccggaagtttgtgaagttgaacagtccatccatctgcactgagaggctggatcctgagtcccggggcagcaggatcccaggaaccttcctcctccagggcagcacaggactcagccatgtctggaccggccctgctgaggctacagtcactctggaagctctgcgcttcatcaggaggcaggactgtggcgggaggggtccttgaagatgggtgtggggagcagtgggtcaggaagtgggagccagaggtttgactcactttgctttatttttcaggctacaatacaggtcagagacaatggcttataaaggtttagtgtggtctcaggatgtgacaggcagtccagcctgacctttctgcacactccagacaaacttcccagacaagctcctttgtgcctctacgtggagagggtgtggaaagttatcacattaaaagatggaggatttgctctgttaaaaaaaaaaaaaaaaaaaaaaaaaaaaaaaaaaaaaaaaa

SEQ ID NO: 42 - protein, 1179 aa, Homo sapiens
MAACGRVRRMFRLSAALHLLLLFAAGAEKLPGQGVHSQGQGPGANFVSFVGQAGGGGPAGQQLPQLPQSSQLQQQQQQQQQQQQPQPPQPPFPAGGPPARRGGAGAGGGWKLAEEESCREDVTRVCPKHTWSNNLAVLECLQDVREPENEISSDCNHLLWNYKLNLTTDPKFESVAREVCKSTITEIKECADEPVGKGYMVSCLVDHRGNITEYQCHQYITKMTGIIFSDYRLICGFMDDCKNDINILKCGSIRLGEKDAHSQGEVVSCLEKGLVKEAEEREPKIQVSELCKKAILRVAELSSDDFHLDRHLYFACRDDRERFCENTQAGEGRVYKCLFNHKFEESMSEKCREALTTRQKLIAQDYKVSYSLAKSCKSDLKKYRCNVENLPRSREARLSYLLMCLESAVHRGRQVSSECQGEMLDYRRMLMEDFSLSPEIILSCRGEIEHHCSGLHRKGRTLHCLMKVVRGEKGNLGMNCQQALQTLIQETDPGADYRIDRALNEACESVIQTACKHIRSGDPMILSCLMEHLYTEKMVEDCEHRLLELQYFISRDWKLDPVLYRKCQGDASRLCHTHGWNETSEFMPQGAVFSCLYRHAYRTEEQGRRLSRECRAEVQRILHQRAMDVKLDPALQDKCLIDLGKWCSEKTETGQELECLQDHLDDLVVECRDIVGNLTELESEDIQIEALLMRACEPIIQNFCHDVADNQIDSGDLMECLIQNKHQKDMNEKCAIGVTHFQLVQMKDFRFSYKFKMACKEDVLKLCPNIKKKVDVVICLSTTVRNDTLQEAKEHRVSLKCRRQLRVEELEMTEDIRLEPDLYEACKSDIKNFCSAVQYGNAQIIECLKENKKQLSTRCHQKVFKLQETEMMDPELDYTLMRVCKQMIKRFCPEADSKTMLQCLKQNKNSELMDPKCKQMITKRQITQNTDYRLNPMLRKACKADIPKFCHGILTKAKDDSELEGQVISCLKLRYADQRLSSDCEDQIRIIIQESALDYRLDPQLQLHCSDEISSLCAEEAAAQEQTGQVEECLKVNLLKIKTELCKKEVLNMLKESKADIFVDPVLHTACALDIKHHCAAITPGRGRQMSCLMEALEDKRVRLQPECKKRLNDRIEMWSYAAKVAPADGFSDLAMQVMTSPSKNYILSVISGSICILFLIGLMCGRITKRVTRELKDR

SEQ ID NO: 43 - DNA, 1760 bp, Homo sapiens
  CDS (14)..(1645)
ccttccggtcaccatggcgaccaggcgccttggggtcggggagacgctgggggccctcaacgcggccctggggccaggcggtccggtgtggatcaaggagacgcgcacccgccacctgcgttcccgagactttctggcaccgcaccgcgcgctgcaggcgcgcttcgatgacggccaggttccggagcatttgctccatgccctcgcctgcctgcagggccccggtgtggccccggtgctgcgctgcgcgccgacccccgcgggtctgtctctccaactgcagcggtccgccgtcttcgagcgcgtcctcagcgccgtggccgcctatgccacgcccgcctcgcctgcctcgctgggccagcgcgtcttactacactgcccagcactgcgcagctccccctgcgcactccgcttgagccagctgcgtacggtgctcgtggccgatcacctggcgcgagccctgcgcgctcacggggtgtgcgtgcgcctagtgccagctgtgcgggatccgcacatgctgaccttcctgcagcaactgcgggtggactggcccgctgcctcggagagagcttcctcccacaccctgaggagccacgcccttgaagaacttacctctgctaatgacgggaggacactgtcccctggcatcctaggcagactgtgtctgaaggagctggtggaagaacagggccgcacagctggctatgaccccaacctggacaactgtctggtgactgaggatctcctctctgtgctggctgagctgcaagaggctctatggcattggcccgaggacagccacccaggcctggctggggcctcagatactggtacaggcggctgcctggttgtacatgttgttagctgtgaggaggagttccagcaacagaagttggacctgctttggcggaagttggttgacaaggctccactcagacagaagcacctcatctgtggccctgtgaaagtagctggtgcacctggcactctgatgactgcccctgagtactacgagttccggcatacccaggtgtgcaaggcctcagcactgaagcatggtggggatctggcacaagacccagcctggacagagatctttggtgttctctctgtggccaccatcaagtttgagatgctgagcacagccccacagagtcagctcttcctggctctggctgacagcagtatctccacgaagggcacaaagagtggcacctttgtcatgtataattgtgcccgtcttgccacactctttgagagttacaagtgtagtatggaacaaggtctgtaccccacttttcctcctgtgagcagtctggacttctcactgctacatgatgagggtgagtggttgttgctcttcaacagtatcctcccctttccggatctgctgagccggacagcagtgctggactgcacagccccggggctccacattgctgtacgcacagagatgatatgcaagttcctggtacagctcagcatggatttcagctcctactacaaccgggtacacatcctgggggagcctcgaccacacctctttggtcagatgttcgtccgcctgcagcttctgagagctgtgcgtgaggtgctccatactggcctggctatgctgggtctccctccactgagccacatttaaggccacagaggctccaatacctgggaatgttcacaaagtcatcaactggaaaaaaagcaaaaacccacggccaaaataaattggtactgtttgttacaaaaaaaaaaaaaaaaaa

SEQ ID NO: 44 - protein, 543 aa, Homo sapiens
MATRRLGVGETLGALNAALGPGGPVWIKETRTRHLRSRDFLAPHRALQARFDDGQVPEHLLHALACLQGPGVAPVLRCAPTPAGLSLQLQRSAVFERVLSAVAAYATPASPASLGQRVLLHCPALRSSPCALRLSQLRTVLVADHLARALRAHGVCVRLVPAVRDPHMLTFLQQLRVDWPAASERASSHTLRSHALEELTSANDGRTLSPGILGRLCLKELVEEQGRTAGYDPNLDNCLVTEDLLSVLAELQEALWHWPEDSHPGLAGASDTGTGGCLVVHVVSCEEEFQQQKLDLLWRKLVDKAPLRQKHLICGPVKVAGAPGTLMTAPEYYEFRHTQVCKASALKHGGDLAQDPAWTEIFGVLSVATIKFEMLSTAPQSQLFLALADSSISTKGTKSGTFVMYNCARLATLFESYKCSMEQGLYPTFPPVSSLDFSLLHDEGEWLLLFNSILPFPDLLSRTAVLDCTAPGLHIAVRTEMICKFLVQLSMDFSSYYNRVHILGEPRPHLFGQMFVRLQLLRAVREVLHTGLAMLGLPPLSHI

SEQ ID NO: 45 - DNA, 1734 bp, Homo sapiens
  CDS (14)..(1564)
  misc_feature (1547)..(1549): Xaa=phenylalanine or serine
ccttccggtcaccatggcgaccaggcgccttggggtcggggagacgctgggggccctcaacgcggccctggggccaggcggtccggtgtggatcaaggagacgcgcacccgccacctgcgttcccgagactttctggcaccgcaccgcgcgctgcaggcgcgcttcgatgacggccaggttccggagcatttgctccatgccctcgcctgcctgcagggccccggtgtggccccggtgctgcgctgcgcgccgacccccgcgggtctgtctctccaactgcagcggtccgccgtcttcgagcgcgtcctcagcgccgtggccgcctatgccacgcccgcctcgcctgcctcgctgggccagcgcgtcttactacactgcccagcactgcgcagctccccctgcgcactccgcttgagccagctgcgtacggtgctcgtggccgatcacctggcgcgagccctgcgcgctcacggggtgtgcgtgcgcctagtgccagctgtgcgggatccgcacatgctgaccttcctgcagcaactgcgggtggactggcccgctgcctcggagagagcttcctcccacaccctgaggagccacgcccttgaagaacttacctctgctaatgacgggaggacactgtcccctggcatcctaggcagactgtgtctgaaggagctggtggaagaacagggccgcacagctggctatgaccccaacctggacaactgtctggtgactgaggatctcctctctgtgctggctgagctgcaagaggctctatggcattggcccgaggacagccacccaggcctggctggggcctcagatactggtacaggcggctgcctggttgtacatgttgttagctgtgaggaggagttccagcaacagaagttggacctgctttggcggaagttggttgacaaggctccactcagacagaagcacctcatctgtggccctgtgaaagtagctggtgcacctggcactctgatgactgcccctgagtactacgagttccggcatacccaggtgtgcaaggcctcagcactgaagcatggtggggatctggcacaagacccagcctggacagagatctttggtgttctctctgtggccaccatcaagtttgagatgctgagcacagccccacagagtcagctcttcctggctctggctgacagcagtatctccacgaagggcacaaagagtggcacctttgtcatgtataattgtgcccgtcttgccacactctttgagagttacaagtgtagtatggaacaaggtctgtaccccacttttcctcctgtgagcagtctggacttctcactgctacatgatgagtatcctcccctttccggatctgctgagccggacagcagtgctggactgcacagccccggggctccacattgctgtacgcacagagatgatatgcaagttcctggtacagctcagcatggatttcagctcctactacaaccgggtacacatcctgggggagcctcgaccacacctctttggtcagatgttcgtccgcctgcagcttytgagagctgtgcgtgaggtgctccatactggcctggctatgctgggtctccctccactgagccacatttaaggccacagaggctccaatacctgggaatgttcacaaagtcatcaactggaaaaaaagcaaaaacccacggccaaaataaattggtactgtttgttacaaaaaaaaaaaaaaaaaa

SEQ ID NO: 46 - protein, 516 aa, Homo sapiens
  misc_feature (512)..(512): The 'Xaa' at location 512 stands for Ser, or Phe.
MATRRLGVGETLGALNAALGPGGPVWIKETRTRHLRSRDFLAPHRALQARFDDGQVPEHLLHALACLQGPGVAPVLRCAPTPAGLSLQLQRSAVFERVLSAVAAYATPASPASLGQRVLLHCPALRSSPCALRLSQLRTVLVADHLARALRAHGVCVRLVPAVRDPHMLTFLQQLRVDWPAASERASSHTLRSHALEELTSANDGRTLSPGILGRLCLKELVEEQGRTAGYDPNLDNCLVTEDLLSVLAELQEALWHWPEDSHPGLAGASDTGTGGCLVVHVVSCEEEFQQQKLDLLWRKLVDKAPLRQKHLICGPVKVAGAPGTLMTAPEYYEFRHTQVCKASALKHGGDLAQDPAWTEIFGVLSVATIKFEMLSTAPQSQLFLALADSSISTKGTKSGTFVMYNCARLATLFESYKCSMEQGLYPTFPPVSSLDFSLLHDEYPPLSGSAEPDSSAGLHSPGAPHCCTHRDDMQVPGTAQHGFQLLLQPGTHPGGASTTPLWSDVRPPAAXESCA

SEQ ID NO: 47 - DNA, 1745 bp, Homo sapiens
  CDS (14)..(1630)
ccttccggtcaccatggcgaccaggcgccttggggtcggggagacgctgggggccctcaacgcggccctggggccaggcggtccggtgtggatcaaggagacgcgcacccgccacctgcgttcccgagactttctggcaccgcaccgcgcgctgcaggcgcgcttcgatgacggccaggttccggagcatttgctccatgccctcgcctgcctgcagggccccggtgtggccccggtgctgcgctgcgcgccgacccccgcgggtctgtctctccaactgcagcggtccgccgtcttcgagcgcgtcctcagcgccgtggccgcctatgccacgcccgcctcgcctgcctcgctgggccagcgcgtcttactacactgcccagcactgcgcagctccccctgcgcactccgcttgagccagctgcgtacggtgctcgtggccgatcacctggcgcgagccctgcgcgctcacggggtgtgcgtgcgcctagtgccagctgtgcgggatccgcacatgctgaccttcctgcagcaactgcgggtggactggcccgctgcctcggagagagcttcctcccacaccctgaggagccacgcccttgaagaacttacctctgctaatgacgggaggacactgtcccctggcatcctaggcagactgtgtctgaaggagctggtggaagaacagggccgcacagctggctatgaccccaacctggacaactgtctggtgactgaggatctcctctctgtgctggctgagctgcaagaggctctatggcattggcccgaggacagccacccaggcctggctggggcctcagatactggtacaggcggctgcctggttgtacatgttgttagctgtgaggaggagttccagcaacagaagttggacctgctttggcggaagttggttgacaaggctccactcagacagaagcacctcatctgtggccctgtgaaagtagctggtgcacctggcactctgatgactgcccctgagtactacgagttccggcatacccaggtgtgcaaggcctcagcactgaagcatggtggggatctggcacaagacccagcctggacagagatctttggtgttctctctgtggccaccatcaagtttgagatgctgagcacagccccacagagtcagctcttcctggctctggctgacagcagtatctccacgaagggcacaaagagtggcacctttgtcatgtataattgtgcccgtcttgccacactctttgagagttacaagtgtagtatggaacaaggtctgtaccccacttttcctcctgtgagcagtctggacttctcactgctacatgatgagggtgagtggttgttgctcttcaacagtatcctcccctttccggatctgctgagccggacagcagtgctggactgcacagccccggggctccacattgctgtacgcacagagatgatatgcaagttcctggtacagctcagcatggatttcagctcctactacaaccgggagcctcgaccacacctctttggtcagatgttcgtccgcctgcagcttctgagagctgtgcgtgaggtgctccatactggcctggctatgctgggtctccctccactgagccacatttaaggccacagaggctccaatacctgggaatgttcacaaagtcatcaactggaaaaaaagcaaaaacccacggccaaaataaattggtactgtttgttacaaaaaaaaaaaaaaaaaa

SEQ ID NO: 48 - protein, 538 aa, Homo sapiens
MATRRLGVGETLGALNAALGPGGPVWIKETRTRHLRSRDFLAPHRALQARFDDGQVPEHLLHALACLQGPGVAPVLRCAPTPAGLSLQLQRSAVFERVLSAVAAYATPASPASLGQRVLLHCPALRSSPCALRLSQLRTVLVADHLARALRAHGVCVRLVPAVRDPHMLTFLQQLRVDWPAASERASSHTLRSHALEELTSANDGRTLSPGILGRLCLKELVEEQGRTAGYDPNLDNCLVTEDLLSVLAELQEALWHWPEDSHPGLAGASDTGTGGCLVVHVVSCEEEFQQQKLDLLWRKLVDKAPLRQKHLICGPVKVAGAPGTLMTAPEYYEFRHTQVCKASALKHGGDLAQDPAWTEIFGVLSVATIKFEMLSTAPQSQLFLALADSSISTKGTKSGTFVMYNCARLATLFESYKCSMEQGLYPTFPPVSSLDFSLLHDEGEWLLLFNSILPFPDLLSRTAVLDCTAPGLHIAVRTEMICKFLVQLSMDFSSYYNREPRPHLFGQMFVRLQLLRAVREVLHTGLAMLGLPPLSHI

SEQ ID NO: 49 - DNA, 1941 bp, Homo sapiens
  CDS (14)..(1771)
ccttccggtcaccatggcgaccaggcgccttggggtcggggagacgctgggggccctcaacgcggccctggggccaggcggtccggtgtggatcaaggagacgcgcacccgccacctgcgttcccgagactttctggcaccgcaccgcgcgctgcaggcgcgcttcgatgacggccaggtgggcgtgagccgggcggggccgtgcggccgggagatgggccccgtgccgtggctcttttacacgcccgttctcccgcaggttccggagcatttgctccatgccctcgcctgcctgcagggccccggtgtggccccggtgctgcgctgcgcgccgacccccgcgggtctgtctctccaactgcagcggtccgccgtcttcgagcgcgtcctcagcgccgtggccgcctatgccacgcccgcctcgcctgcctcgctgggccagcgcgtcttactacactgcccagcactgcgcagctccccctgcgcactccgcttgagccagctgcgtacggtgctcgtggccgatcacctggcgcgagccctgcgcgctcacggggtgtgcgtgcgcctagtgccagctgtgcgggatccgcacatgctgaccttcctgcagcaactgcgggtggactggcccgctgcctcggagagagcttcctcccacaccctgaggagccacgcccttgaagaacttacctctgctaatgacgggaggacactgtcccctggcatcctaggcagactgtgtctgaaggagctggtggaagaacagggccgcacagctggctatgaccccaacctggacaactgtctggtgactgaggatctcctctctgtgctggctgagctgcaagaggctctatggcattggcccgaggacagccacccaggcctggctggggcctcagatactggtacaggcggctgcctggttgtacatgttgttagctgtgaggaggagttccagcaacagaagttggacctgctttggcggaagttggttgacaaggctccactcagacagaagcacctcatctgtggccctgtgaaagtagctggtgcacctggcactctgatgactgcccctgagtactacgagttccggcatacccaggtgtgcaaggcctcagcactgaagcatggtggggatctggcacaagacccagcctggacagagatctttggtgttctctctgtggccaccatcaagtttgagatgctgagcacagccccacagagtcagctcttcctggctctggctgacagcagtatctccacgaagggcacaaagagtggcacctttgtcatgtataattgtgcccgtcttgccacactctttgagagttacaagtgtagtatggaacaaggtctgtaccccacttttcctcctgtgagcagtctggacttctcactgctacatgatgagggtgagtggttgttgctcttcaacagtatcctcccctttccggatctgctgagccggacagcagtgctggactgcacagccccggggctccacattgctgtacgcacagagatggtgaggcatagacaaccaggacactctacactctattctttattctggcctggggcacaagagcaaagagatgggccagtgactcagtctctgtctctagatatgcaagttcctggtacagctcagcatggatttcagctcctactacaaccgggtacacatcctgggggagcctcgaccacacctctttggtcagatgttcgtccgcctgcagcttctgagagctgtgcgtgaggtgctccatactggcctggctatgctgggtctccctccactgagccacatttaaggccacagaggctccaatacctgggaatgttcacaaagtcatcaactggaaaaaaagcaaaaacccacggccaaaataaattggtactgtttgttacaaaaaaaaaaaaaaaaaa

SEQ ID NO: 50 - protein, 585 aa, Homo sapiens
MATRRLGVGETLGALNAALGPGGPVWIKETRTRHLRSRDFLAPHRALQARFDDGQVGVSRAGPCGREMGPVPWLFYTPVLPQVPEHLLHALACLQGPGVAPVLRCAPTPAGLSLQLQRSAVFERVLSAVAAYATPASPASLGQRVLLHCPALRSSPCALRLSQLRTVLVADHLARALRAHGVCVRLVPAVRDPHMLTFLQQLRVDWPAASERASSHTLRSHALEELTSANDGRTLSPGILGRLCLKELVEEQGRTAGYDPNLDNCLVTEDLLSVLAELQEALWHWPEDSHPGLAGASDTGTGGCLVVHVVSCEEEFQQQKLDLLWRKLVDKAPLRQKHLICGPVKVAGAPGTLMTAPEYYEFRHTQVCKASALKHGGDLAQDPAWTEIFGVLSVATIKFEMLSTAPQSQLFLALADSSISTKGTKSGTFVMYNCARLATLFESYKCSMEQGLYPTFPPVSSLDFSLLHDEGEWLLLFNSILPFPDLLSRTAVLDCTAPGLHIAVRTEMVRHRQPGHSTLYSLFWPGAQEQRDGPVTQSLSLDMQVPGTAQHGFQLLLQPGTHPGGASTTPLWSDVRPPAASESCA

SEQ ID NO: 51 - DNA, 4295 bp, Homo sapiens
  CDS (219)..(1610)
ccttatgggactttcctacttggcagtacatctacgtattagtcatcgctattaccatggtgatgcggttttggcagtacaccaatgggcgtggatagcggtttgactcacggggatttccaagtctccaccccattgacgtcaatgggagtttgttttggcaccaaaatcaacgggactttccaaaatgtcgtaataaccccgccccgttgacgcaaatgggcggtaggcgtgtacggtgggaggtctatataagcagagctcgtttagtgaaccgtcagaattttgtaatacgactcactatagggcggccgcgaattcggcacgagcttaggggtccggggcccgggctgctgctgctggccgtcctgtgcctggggacagcggtgccctccacgggagcctcgaagagcaagaggcaggctcagcaaatggttcagccccagtccccggtggctgtcagtcaaagcaagcccggttgttatgacaatggaaaacactatcagataaatcaacagtgggagcggacctacctaggcaatgcgttggtttgtacttgttatggaggaagccgaggttttaactgcgagagtaaacctgaagctgaagagacttgctttgacaagtacactgggaacacttaccgagtgggtgacacttatgagcgtcctaaagactccatgatctgggactgtacctgcatcggggctgggcgagggagaataagctgtaccatcgcaaaccgctgccatgaagggggtcagtcctacaagattggtgacacctggaggagaccacatgagactggtggttacatgttagagtgtgtgtgtcttggtaatggaaaaggagaatggacctgcaagcccatagctgagaagtgttttgatcatgctgctgggacttcctatgtggtcggagaaacgtgggagaagccctaccaaggctggatgatggtagattgtacttgcctgggagaaggcagcggacgcatcacttgcacttctagaaatagatgcaacgatcaggacacaaggacatcctatagaattggagacacctggagcaagaaggataatcgaggaaacctgctccagtgcatctgcacaggcaacggccgaggagagtggaagtgtgagaggcacacctctgtgcagaccacatcgagcggatctggccccttcaccgatgttcgtgcagctgtttaccaaccgcagcctcacccccagcctcctccctatggccactgtgtcacagacagtggtgtggtctactctgtggggatgcagtggctgaagacacaaggaaataagcaaatgctttgcacgtgcctgggcaacggagtcagctgccaagagacagctgtaacccagacttacggtggcaactcaaatggagagccatgtgtcttaccattcacctacaatggcaggacgttctactcctgcaccacagaagggcgacaggacggacatctttggtgcagcacaacttcgaattatgagcaggaccaggaggaaattccaatggtgccttgtgccacttccccttcctatacaacaaccacaattacactgattgcacttctgagggcagaagagacaacatgaagtggtgtgggaccacacagaactatgatgccgaccagaagtttgggttctgccccatggctgcccacgaggaaatctgcacaaccaatgaaggggtcatgtaccgcattggagatcagtgggataagcagcatgacatgggtcacatgatgaggtgcacgtgtgttgggaatggtcgtggggaatggacatgcattgcctactcgcagcttcgagatcagtgcattgttgatgacatcacttacaatgtgaacgacacattccacaagcgtcatgaagaggggcacatgctgaactgtacatgcttcggtcagggtcggggcaggtggaagtgtgatcccgtcgaccaatgccaggattcagagactgggacgttttatcaaattggagattcatgggagaagtatgtgcatggtgtcagataccagtgctactgctatggccgtggcattggggagtggcattgccaacctttacagacctatccaagctcaagtggtcctgtcgaagtatttatcactgagactccgagtcagcccaactcccaccccatccagtggaatgcaccacagccatctcacatttccaagtacattctcaggtggagacctgtgagtatcccacccagaaaccttggatactgagtctcctaatcttatcaattctgatggtttctttttttcccagcttttgagccaacaactctgattaactattcctatagcatttactatatttgtttagtgaacaaacaatatgtggtcaattaaattgacttgtagactgaggggattttggttttggttttgggttttgtttttttgcggtgggggggctggtatttggaagaatttagctctttatgttacagaaatcttttttgcaaggacttagaaatgataatgcttaagattgttcttgcccaatgtgggaagagaatctaaggtttttatatgtcttgcaacctcatcaaaggaaaattactggcatcattttcataatttgaaaaaaaaagccaaattaatatatttcttttttgattcactttttaagtgatcatttttaaaactttacttttgacccactgaatttatttagatagaaggaaaagagatgatgggagggaagtttagataaaggatggaagttggttttatttaaacaatagccctgtgatttcctaatgagaagtgactagaaattgaagaaaccaaataaggaggatattggtcaatttagctttagtttctcttactctctcaagcctgccctgtttaactccaaagttcatggctcataatttgagaaacactgttttaaacacaggagaaaaaaaatgtccattttaaatcatagctattgaattctacaattacaaagaaacaaacaaacaaaatttgaccaacccaggcggttaaatttaaactcttcaggaaaaatttaagctgttaaaattattctttttctaaatttctaaagtggagggacagaatttttcagatttaaaagggcctcctaggtgcccagaaaattagtggaaagaaccacgtctagacgcatctttgatgtgtcagagttccaaggataaaaagaaacttttaaagtcttctatactcagccaggttatcaatcaaatatgagggcaaaataatattttcagacagattttaggcagtgtatcttccatatatccttttctttaagggtatttgtagatacactccagaaaaacaagagtgaaatatgaaggaagttgtggggtccagcaaacagtgcttccaaatcagacccctgatagaggtggaaaactttgcaatgcaacaactgcgtagctggcttagaggacagccaatacagatggaacagaaagatgaggatgggattgagggatcagggattgaggtctccaagaataaaaagggacttcatggaaaaagtaggcttgtggataattaatcacaggggcaaataatgcagttaaaataacaacatgacaatcaggtggaggaatgtataataaacccaaatgtggctgggtagagtggctcacacctgtaatcccagcactttgggaggccaagccgggcagattacctgaggtcaggagttcgagaccagcttggccaacatggcgaaaccccgtctctactaaaaatacaaaaattagccaggcttgggggcgcacgcctgtagtcccagctcctcaggagctgaggtaggagaatcacttgaacccaggaggcaaagggtgcagggagttgagccaagatcgcgccattgcaccctagcctgggcaacagagcgagattctgtttcaaaaaacccccaagtgtattataaggcaataattcctatacgaagcaaactaaaatgcagcaatattaaggtataaaaacaaagaggaataattccattgaaccttgattctggaaactttgatccacccagcagtcatgatgttagactcattgaaaagaatgtatttctaatgcatgatgcaatcggtctatagatgtgtcatggaaacttggttgcaacttcaagacaaaataaaaagtaaacatttacatgaaaaatggtggatatggaaggtggagaagagaggagataacagctttatctttcaaaatagagaattgagagatggtaccaaaagctgatgaagtaaaaaaaaaaaaaaaaaaa

SEQ ID NO: 52 - protein, 463 aa, Homo sapiens
MGGRRVRWEVYISRARLVNRQNFVIRLTIGRPRIRHELRGPGPGLLLLAVLCLGTAVPSTGASKSKRQAQQMVQPQSPVAVSQSKPGCYDNGKHYQINQQWERTYLGNALVCTCYGGSRGFNCESKPEAEETCFDKYTGNTYRVGDTYERPKDSMIWDCTCIGAGRGRISCTIANRCHEGGQSYKIGDTWRRPHETGGYMLECVCLGNGKGEWTCKPIAEKCFDHAAGTSYVVGETWEKPYQGWMMVDCTCLGEGSGRITCTSRNRCNDQDTRTSYRIGDTWSKKDNRGNLLQCICTGNGRGEWKCERHTSVQTTSSGSGPFTDVRAAVYQPQPHPQPPPYGHCVTDSGVVYSVGMQWLKTQGNKQMLCTCLGNGVSCQETAVTQTYGGNSNGEPCVLPFTYNGRTFYSCTTEGRQDGHLWCSTTSNYEQDQEEIPMVPCATSPSYTTTTITLIALLRAEETT

SEQ ID NO: 53 - DNA, 3113 bp, Homo sapiens
  CDS (524)..(2695)
caccagcgagaaagagggagaggaagacagatagggggcgggggaagaagaaaaagaaaggtaaaaagtcttctaggagaacctttcacatttgcaacaaaagacctaggggctggagagagattcctgggacgcagggctggagtgtctatttcgagctcagcggcagggctcgggcgcgagtcgagaccctgctcgctcctctcgcttctgaaaccgacgttcaggagcggctttttaaaaacgcaaggcacaaggacggtcacccgcgcgactatgtttgctgatttttcgccttgccctctttaaaagcggcctcccattccccaaaagacacttcccctcctccctttgaagtgcattagttgtgatttctgcctccttttcttttttctttcttttttgttttgctttttccccccttttgaattatgtgctgctgttaaacaacaacaaaaaaacaacaaaacacagcagctgcggacttgtccccggctggagcccagcgccccgcctggagtggatgagcctctccatgagagatccggtcattcctgggacaagcatggcctaccatccgttcctacctcaccgggcgccggacttcgccatgagcgcggtgctgggtcaccagccgccgttcttccccgcgctgacgctgcctcccaacggcgcggcggcgctctcgctgccgggcgccctggccaagccgatcatggatcaattggtgggggcggccgagaccggcatcccgttctcctccctggggccccaggcgcatctgaggcctttgaagaccatggagcccgaagaagaggtggaggacgaccccaaggtgcacctggaggctaaagaactttgggatcagtttcacaagcggggcaccgagatggtcattaccaagtcgggaaggcgaatgtttcctccatttaaagtgagatgttctgggctggataaaaaagccaaatacattttattgatggacattatagctgctgatgactgtcgttataaatttcacaattctcggtggatggtggctggtaaggccgaccccgaaatgccaaagaggatgtacattcacccggacagccccgctactggggaacagtggatgtccaaagtcgtcactttccacaaactgaaactcaccaacaacatttcagacaaacatggatttactatattgaactccatgcacaaataccagccccggttccacattgtaagagccaatgacatcttgaaactcccttatagtacatttcggacatacttgttccccgaaactgaattcatcgctgtgactgcataccagaatgataagataacccagttaaaaatagacaacaacccttttgcaaaaggtttccgggacactggaaatggccgaagagaaaaaagaaaacagctcaccctgcagtccatgagggtgtttgatgaaagacacaaaaaggagaatgggacctctgatgagtcctccagtgaacaagcagctttcaactgcttcgcccaggcttcttctccagccgcctccactgtagggacatcgaacctcaaagatttatgtcccagcgagggtgagagcgacgccgaggccgagagcaaagaggagcatggccccgaggcctgcgacgcggccaagatctccaccaccacgtcggaggagccctgccgtgacaagggcagccccgcggtcaaggctcaccttttcgctgctgagcggccccgggacagcgggcggctggacaaagcgtcgcccgactcacgccatagccccgccaccatctcgtccagcactcgcggcctgggcgcggaggagcgcaggagcccggttcgcgagggcacagcgccggccaaggtggaagaggcgcgcgcgctcccgggcaaggaggccttcgcgccgctcacggtgcagacggacgcggccgccgcgcacctggcccagggccccctgcctggcctcggcttcgccccgggcctggcgggccaacagttcttcaacgggcacccgctcttcctgcaccccagccagtttgccatggggggcgccttctccagcatggcggccgctggcatgggtcccctcctggccacggtttctggggcctccaccggtgtctcgggcctggattccacggccatggcctctgccgctgcggcgcagggactgtccggggcgtccgcggccaccctgcccttccacctccagcagcacgtcctggcctctcagggcctggccatgtcccctttcggaagcctgttcccttacccctacacgtacatggccgcagcggcggccgcctcctctgcggcagcctccagctcggtgcaccgccaccccttcctcaatctgaacaccatgcgcccgcggctgcgctacagcccctactccatcccggtgccggtcccggacggcagcagtctgctcaccaccgccctgccctccatggcggcggccgcggggcccctggacggcaaagtcgccgccctggccgccagcccggcctcggtggcagtggactcgggctctgaactcaacagccgctcctccacgctctcctccagctccatgtccttgtcgcccaaactctgcgcggagaaagaggcggccaccagcgaactgcagagcatccagcggttggttagcggcttggaagccaagccggacaggtcccgcagcgcgtccccgtagacccgtcccagacacgtcttttcattccagtccagttcaggctgccgtgcactttgtcggatataaaataaaccacgggcccgccatggcgttagcccttccttttgcagttgcgtctgggaaggggccccggactccctcgagagaatgtgctagagacagcccctgtcttcttggcgtggtttatatgtccgggatctggatcagattctgggggctcagaaacgtcggttgcattgagctactgggggtaggagttccaacatttatgtccagagcaacttccagcaaggctggtctgggtctctgcccaccaggcggggaggtgttcaaagacatctccctcagtgcggatttatatatatatttttccttcactgtgtcaagtggaaacaaaaacaaaaaaaaaaaaaaaaaa

SEQ ID NO: 54 - protein, 723 aa, Homo sapiens
MSLSMRDPVIPGTSMAYHPFLPHRAPDFAMSAVLGHQPPFFPALTLPPNGAAALSLPGALAKPIMDQLVGAAETGIPFSSLGPQAHLRPLKTMEPEEEVEDDPKVHLEAKELWDQFHKRGTEMVITKSGRRMFPPFKVRCSGLDKKAKYILLMDIIAADDCRYKFHNSRWMVAGKADPEMPKRMYIHPDSPATGEQWMSKVVTFHKLKLTNNISDKHGFTILNSMHKYQPRFHIVRANDILKLPYSTFRTYLFPETEFIAVTAYQNDKITQLKIDNNPFAKGFRDTGNGRREKRKQLTLQSMRVFDERHKKENGTSDESSSEQAAFNCFAQASSPAASTVGTSNLKDLCPSEGESDAEAESKEEHGPEACDAAKISTTTSEEPCRDKGSPAVKAHLFAAERPRDSGRLDKASPDSRHSPATISSSTRGLGAEERRSPVREGTAPAKVEEARALPGKEAFAPLTVQTDAAAAHLAQGPLPGLGFAPGLAGQQFFNGHPLFLHPSQFAMGGAFSSMAAAGMGPLLATVSGASTGVSGLDSTAMASAAAAQGLSGASAATLPFHLQQHVLASQGLAMSPFGSLFPYPYTYMAAAAAASSAAASSSVHRHPFLNLNTMRPRLRYSPYSIPVPVPDGSSLLTTALPSMAAAAGPLDGKVAALAASPASVAVDSGSELNSRSSTLSSSSMSLSPKLCAEKEAATSELQSIQRLVSGLEAKPDRSRSASP

SEQ ID NO: 55 - DNA, 2727 bp, Homo sapiens
  CDS (197)..(535)
cgggccggcctggtgctgcacgcctgtcagccatcgcccgagccgccggcgtctcctcccgcccagcagttcctccacgcaggggctccggaatcgcccgaccgcacacgttgccaccctgaggtctttttggaagtggatatctactcagacagtaagaattataagagctgtaagagctcattttggaggaataatggatgaaccatctcccttggcccaacctctggagctgaaccagcactctcgattcataataggttctgtgtctgaagataactcagaggatgagatcagcaacctggtgaagttggacctactggaggagaaggagggctccttgtcacctgcttctgttggctcagatacactctctgatttggggatctctagcctacaggatggcttggccttgcacataagttcttggattaaaaggtctggatcagtggttcttggttctcactgttcatcagaatcacctcggggagccttgggagataagccccatccccagagatttcgattcatttgatactggcttggtgtggaactggggcttttttttaagggacagagtcttaccatgttgcccaggctggtttcgaactcctggcctcaagtgaccttcttgccttggcctcccaaatctctggaattacaggctccaaagatctgcctttccccttccactctgtgaggacacaatgagaatcatgcaagcgagtaggacctggaggcagggaacccaagaactttctagaactaaatcaaatggaaacaagcacttcagttatgacaggaagcatcctcttcctttacataggatatacactgaataaatgactttgtaacttcatcatctttatttacacagggtgtataccaagtaacaatggaaatctctagagggtatttaaaccccagaaaattctgtaaccagacccttgagtggctggcttgcttgggccagctcccaacctgtagagtgtgctttcattttcttttttttattttttattttaattttttgattttttgaaatggagtctcgccctttagcccaggctggagtgcagtggtgcgatcttggctcattgaaacctttgcctcccgggttcaagcaattctcatgcctcagcctcccgagtagctgggactataggtgcccaccaccacgcccagctaattttttgtattttttagtagagatggggtttcactgtgttagccaggatggtcttgatctcctgacctcgtgatccacccgcctcagcctcccaatgtgttgggattacaggtgtgagccaccgtgcctggcctaatttttgtatttttagtagagacaacgtttcaacatgttggctaggctggtctcgaactcctgacctcatgttatccccccacatttacctcccaaagtgctggaattacagacatgagccactgtgcctggccgtgtgctttcattttcagttaagtctctgcttttgttgctttattctttccctgctttgtttgtgtgttttgttcaattctttgttcaaaacaccaagaacttgtacagcctccactggtaacatattttggcaagccagccaggaggtaatcccaaagtttggggtttatttttcttgtttgtttttcctgctccatacaggggaatctcagtctctctctctcttttcctttccaacttgggacggttggtgggcagcacctaaacacagaggcaactgcaggtttctggccggggccactctgaaggactcctttctatcttttccagttgtggtccctgatccctacgtgtggcacagcttggggcgagctggcatttgtttcagtgacttaaaccttgttttctcatgctaaattcttcccttcccctactctactggctaaggacaaaagaaacccacccagcctccagttcctatcattacagttcatggctatcactctagtggaacaggaagcatgggaaagtgtggccttatcaaattataaggatgccagaagtccaggccttcatccagggacaaaaggaaacctcatagtaggccattgcctctgaagggaaaacatgctaagcagcaccagtgcccacctaaggtcagagacgtctgacactctgagactggaccccaaagggggacggcccagggatcctccagacctcaacttctccaaaggggacaccctaggcagagttctgaggtctagtattaagccctccttagaattttctctcgcagttgcaatactgtttggcccaatattgtttggaatctggagcttgctgttgaatgggaaagtgggatggagttgcatgtgtcaaactgctgtggaaactgctatatctgaaattttggttcacagccttcattggattatctgttggggcaaacaaaggaaaaccccccaagcttgtattgctatctcatgccttaagattcccagttaaaagcgattgaatcttcgtttgtgtgcgtctatacatgtctagatgtgtttatttgtatgcacacttattgttacatgttgtgtctaccaaattggcttataaataaaagagcacttaaaaattaagtaaataagtctaagcaattttcaagttcacgtgacttaagtataactttactaaacaagctggctttaaaattattagtaaaataaaactagaaatgccttcaaaaaaaaaaaaaaaaaaaaaaaaaaaaaaaa

SEQ ID NO: 56 - protein, 112 aa, Homo sapiens
MDEPSPLAQPLELNQHSRFIIGSVSEDNSEDEISNLVKLDLLEEKEGSLSPASVGSDTLSDLGISSLQDGLALHISSWIKRSGSVVLGSHCSSESPRGALGDKPHPQRFRFI

SEQ ID NO: 57 - DNA, 593 bp, Homo sapiens
  CDS (13)..(369)
gcttggtgcgctatggcgacacccagcctgcggggtcgtctggcgcggtttgggaacccgcggaagcctgtgctgaagcccaataaacctctcattctagctaaccgcgtcggggagcggcgccgggagaagggcgaggcgacttgcatcacggagatgtcggtgatgatggcttgctggaagcagaatgaattccgcgacgatgcgtgcagaaaagagatccagggcttcctcgattgtgccgcgagggctcaggaagcccgaaagatgagatcaatacaggaaaccctgggagagtctgggagtttacttccaaataaattgaataagttgttacagaggtttcctaacaaaccttacctcagctgaaaatggacaagtattttcaatgactgaaatatagcttctgacaactatgcagaggcattttagagacattggcattgccatgccctctttggagggtagaagaggcaaaacacttttttcaccctttggaatcatagtatgggtagaagttatgatttatcttgaaataaaatcctctgaacagaaaaaaaaaaaaaaaaaaaaaaaaaaaaaaaaaaaaaaaa

SEQ ID NO: 58 - protein, 118 aa, Homo sapiens
MATPSLRGRLARFGNPRKPVLKPNKPLILANRVGERRREKGEATCITEMSVMMACWKQNEFRDDACRKEIQGFLDCAARAQEARKMRSIQETLGESGSLLPNKLNKLLQRFPNKPYLS

SEQ ID NO: 59 - DNA, 3860 bp, Homo sapiens
  CDS (45)..(2486)
gaattccctaaagaattagaagtgcgtctcaccaaccagccaagatgaacatggtgaagaggatcatggggcggccgaggcaggaggagtgcagcccacaagacaacgccttaggactgatgcacctccgccggctcttcacggagttgtgccatcctccccggcacatgactcagaaggaacaagaagagaaactgtatatgatgctgccagtgtttaacagggtttttggaaatgctccgccgaatacaatgacagaaaaattttctgatcttctgcagttcacaacacaagtctcacgactaatggtgacagaaattcgaaggagagcatcaaacaaatccacagaaaaacagtgtgccctgctgtcccccaaggatttcaaagccacaacaccttcagaggctgcaagtcgggccatagttcagttcctagagattaatcagagtgaagaagccagtagaggctggatgcttctaacgacaattaatttgttagcttcctctggtcagaaaaccgtggactgcatgacaacaatgtcagtgccttccaccctggttaaatgtttatatctgttttttgaccttccacatgtgcctgaggcagttggaggtgcacagaatgagctacctctagcagaacgtcgaggactactccagaaagtttttgtacagatcttagtgaaactgtgcagttttgtttcccctgcggaggagctggctcagaaagatgatctccagcttctattcagtgcaataacctcttggtgccctccctataacctgccttggagaaagagtgctggagaagtcctcatgaccatatctcgtcatggtcttagtgtcaatgtagtgaagtatattcatgagaaagagtgtttatctacatgtgttcagaatatgcagcaatcagatgacctgtctcccctagaaattgtcgaaatgtttgctgggctttcttgtttcctcaaagattccagcgatgtttcccaaacacttctggatgattttcggatatggcaaggatataattttctttgtgatctcttgcttagattggaacaagcaaaagaggcagaatccaaagatgccttgaaagatctggttaatctgataacttccctaacaacatatggtgtcagtgaactaaaaccagctggtattaccacaggggcaccctttttattgcctggatttgcagtacctcagcctgcaggcaaaggtcacagtgtgagaaacgtccaggcctttgcagttcttcagaatgcatttttaaaagcaaaaaccagcttccttgcccaaatcatccttgatgctatcacaaatatttacatggctgacaatgccaattacttcatcctagagtcacagcacacattgtcacagtttgcagagaagatttctaaactcccagaagtacaaaacaaatactttgagatgctggagtttgttgtttttagcttaaattatataccttgtaaagaacttattagtgtcagtatcctcttaaaatctagctcttcttatcactgtagcattattgcaatgaaaacacttcttaagtttacaagacatgactacatatttaaagacgtgttcagggaggttggccttttggaggtcatggtaaaccttttgcataaatatgctgccctgttgaaggatccaactcaggcactaaatgaacaaggggactcaagaaataatagttcagttgaagaccaaaaacacctggctttattggttatggagaccttgacagtgcttcttcaaggatcaaacacaaatgcaggaatttttcgagaatttggaggtgcaagatgtgcacataatatagtaaagtaccctcaatgccggcagcatgccttgatgactatccaacagctggtgctctccccaaatggggacgatgacatgggcactctcctggggctaatgcattcagccccaccgacggaattgcagttgaagactgatattttaagggccctcctgtcggtccttcgagaaagccatcgttcaagaacagtttttaggaaagttggaggatttgtgtacattacatccttgctcgttgctatggaaagatctttgagctgtccacccaagaatggctgggagaaagtgaaccagaatcaagtgtttgaacttcttcacactgtgttctgcacgttgactgcagcaatgcgctatgagccagccaactctcatttcttcaaaacagagattcagtatgagaagttggcagatgctgttcgatttcttggctgcttctcagacctaagaaaaataagcgccatgaatgtcttcccctcaaatacacagccatttcaaagacttttagaggaagatgtaatctcaatagaatcagtgtcacccacgttacggcactgcagtaaactttttatttatctttacaaagtagccacagattcttttgacaggtatggctctgctctgtcctctgaattaaagggtgtatactaagcatgacttcaacattaagacttgaattatgagttaatccaaaagaatatgaaaacagatgactcttctcctatttgtttgaagtgtatcactttatttttgaatattactcttgctctggtattgttttttttttttttttagcatggaagcctgtgtactatttgtaaattcaggttcaattagttctcattgcagttattggaacagtttctatgaagtttcctttaatgatagtgtttactgttgttttttttctttttagcctcaaaaggtgcatctggacttattgatatgtgttatcaatagaacatcattatgattattcttatttccagacacgtactccatcattctccacatatcatactcctcaaaaaatgatatagttcccaaagagaggtgtcagtgtcttgaaccgtcaagttcaagaggccatcagactcaatatttactcattccttcatgaaataagtacttaacaaaaagctgctgcatgccaagtcactgtgctaggcattgaggattcagctctacacagggctgtcttggtccttgctatcttttagctaaaatgtagacacataaataaacaattacatatagtgtgacacattctacagtgggggaatccagggttctcaggcagattgtaggagagccacttcatctagatcacttattttcagtgcttcaactgtgttttcaatgaagatgtcactttgaaaataatacttctaatttatgccccaagtgttattgcttttaacttaccatagttttactacataaaataaatgaactgccctcatcaatagaccatgtaactacattggatagagcttgtaataggttttgtgtccttttctgtggaatatctgctttgaagtatcaactgagatatttcctgcttcttaacaagatttcttagtcctcagtatttacatttaaaaatccaaacagctttgacaacaattgtaaaaaaaaaaatcattaaacttctgcttttccctatcttgaagtaaaatgcatatgtatagttaatttatcgaaaacacaggacagtgtagtgttctaggaatgagctatataaatttgtgtattcagattcaacctcttttcccttgatttctacttatcctagttagaatacatcatttttagtcactgtcaaaaatagggcttagagcaccctgtttaacagatgtgttaaatgttaacatgaatggaataagcatctgccgtgagcatgcttttctgtttcattcagtgcttgtgttgtagtcttgttccttgttcctgctgaatatggaagatgttccttattaaacttttactggcatttcttgtgaaactaaaaaaaaaaaaaaaaaa

SEQ ID NO: 60 - protein, 813 aa, Homo sapiens
MNMVKRIMGRPRQEECSPQDNALGLMHLRRLFTELCHPPRHMTQKEQEEKLYMMLPVFNRVFGNAPPNTMTEKFSDLLQFTTQVSRLMVTEIRRRASNKSTEKQCALLSPKDFKATTPSEAASRAIVQFLEINQSEEASRGWMLLTTINLLASSGQKTVDCMTTMSVPSTLVKCLYLFFDLPHVPEAVGGAQNELPLAERRGLLQKVFVQILVKLCSFVSPAEELAQKDDLQLLFSAITSWCPPYNLPWRKSAGEVLMTISRHGLSVNVVKYIHEKECLSTCVQNMQQSDDLSPLEIVEMFAGLSCFLKDSSDVSQTLLDDFRIWQGYNFLCDLLLRLEQAKEAESKDALKDLVNLITSLTTYGVSELKPAGITTGAPFLLPGFAVPQPAGKGHSVRNVQAFAVLQNAFLKAKTSFLAQIILDAITNIYMADNANYFILESQHTLSQFAEKISKLPEVQNKYFEMLEFVVFSLNYIPCKELISVSILLKSSSSYHCSIIAMKTLLKFTRHDYIFKDVFREVGLLEVMVNLLHKYAALLKDPTQALNEQGDSRNNSSVEDQKHLALLVMETLTVLLQGSNTNAGIFREFGGARCAHNIVKYPQCRQHALMTIQQLVLSPNGDDDMGTLLGLMHSAPPTELQLKTDILRALLSVLRESHRSRTVFRKVGGFVYITSLLVAMERSLSCPPKNGWEKVNQNQVFELLHTVFCTLTAAMRYEPANSHFFKTEIQYEKLADAVRFLGCFSDLRKISAMNVFPSNTQPFQRLLEEDVISIESVSPTLRHCSKLFIYLYKVATDSFDRYGSALSSELKGVY

SEQ ID NO: 61 - DNA, 10567 bp, Homo sapiens
  CDS (124)..(9279)
ctggatccgctggttccgtaacaacatcccgttggcttccctcaggcggcgggaccagtgcagccgccgcctcccaggatcgtccgccggtcagggcccttgccctccccggcacaggccaccatggccaccaacccacagccgcagccgcctcctccggcgccgccgcctcccccgccgcagccgcagccgcagccaccgccgccgccgccgggccccggggctggccccggcgcgggcggggcgggcggcgcgggtgcgggcgccggggacccgcagctcgtggccatgatcgtgaaccacctcaagagccaggggctcttcgaccagttccgcagagactgcctggccgacgtggacaccaagcctgcgtatcagaatctgagacagcgtgttgacaactttgttgcaaatcacttggcaactcacacatggagtccgcatctcaataagaaccagctaagaaacaacattagacaacaagtcctcaaatcaggaatgttggagtctggtattgaccgaattatttctcaggttgtggacccaaagatcaaccacacattcagacctcaggtagagaaagctgtgcatgagtttttggccacgctaaatcacaaagaggaaggaagtggcaacacagctcccgatgatgagaaaccagacacttcccttattacacaaggtgttcctactcctgggcccagtgctaatgtagccaatgatgccatgtcgatattggaaaccataacttctcttaaccaagaagccagtgctgctagggcttcaacagaaacatcaaatgccaagaccagtgagagagcgtcaaaaaaacttccatctcagccaaccactgatactagtactgacaaagaaagaacttcagaggacatggctgataaagaaaaatctacagctgactctggaggtgaaggactggaaacagccccaaagtctgaagagttcagcgacctcccctgtccagtcgaagaaattaaaaattacacaaaagagcataataatttaattctgctaaataaggatgttcaacaggaaagcagtgagcaaaaaaataaatcaacagacaaaggtgaaaagaagccagacagcaatgagaaaggagaaagaaagaaagaaaagaaggaaaagactgaaaagaaatttgatcactcaaaaaagagtgaagatacacagaaagttaaagatgaaaaacaagcaaaggaaaaagaagtagagagtttaaaacttccttcagaaaagaacagtaataaagctaaaactgttgaagggacaaaagaagatttctctttgatagattctgatgtggatggacttacagacatcacagttagctctgttcataccagtgacctttcatcttttgaagaagatactgaggaggaagttgtaacgtctgatagcatggaagaaggagagattacgtcagatgatgaagagaagaacaaacagaataaaacaaaaactcaaactagtgattctagtgaaggaaaaacaaaaagtgtacggcatgcgtatgtccacaaaccatatctttactcaaaatactatagtgattctgatgatgagcttactgtagaacaacgacgacagtccattgccaaagaaaaagaagagaggcttttaagaaggcaaatcaatagagaaaaacttgaagaaaaacgaaaacagaaagcagaaaagacaaagtcttcaaaaaccaagggtcaaggcaggagtagtgtggacttagaagaatcatcaacaaagagtttggaacctaaagccgccagaattaaagaagtccttaaagaacggaaagttttagaaaaaaaagtagccttaagcaaaaagagaaaaaaagattcaaggaatgttgaagagaactccaaaaagaaacagcaatatgaagaagattccaaagaaacccttaaaacaagtgagcattgtgaaaaggaaaaaatttcttcttcaaaggagctgaagcatgttcatgcaaaaagtgaaccaagtaaacctgcccggagactttcagagtctttgcatgtagttgacgaaaacaaaaatgaatccaaaatagaaagagaacataaaagacggacatctacccctgttatcatggagggggtacaggaagagactgacacaagagatgtaaaaaggcaagtagaacgctcagaaatttgcaccgaagagccccagaaacagaaaagcacacttaaaaacgaaaagcatctaaagaaagatgattctgaaacaccacatttgaaaagcctacttaagaaagaggtgaaatcctccaaggagaagcctgaaagagagaaaactccatcggaagacaaattgtctgtgaaacataaatataaaggtgattgtatgcataaaacaggtgatgagactgagcttcactcttctgagaaaggtttaaaagtagaggaaaatattcaaaagcaaagtcaacaaacaaagctttcttcagatgataaaaccgaacgaaaaagtaaacataggaatgaaaggaaattatcagtattaggcaaagatggaaagccagtttctgaatatattataaaaacagatgagaatgttcgtaaagaaaacaacaaaaaagagagacgcttgtcagctgaaaaaactaaggcagagcacaaatcaagaaggtcaagtgattctaaaattcagaaagattctctgggttccaagcaacatggtatcacattacagagaagaagtgaaagttattcggaagataagtgtgatatggactccactaacatggatagtaatttgaaaccagaagaggttgttcacaaggagaaacgacgaacaaagagcttgttagaagagaaacttgtgttgaagtctaaatcaaaaactcaaggcaaacaggtaaaagttgtagaaacagaattacaagaaggtgccacaaaacaggcaaccactccaaaaccagacaaggagaagaacacagaagaaaatgactcagaaaaacagcgtaagtctaaagttgaagacaaaccttttgaagaaactggtgttgaacctgtattagagactgcttcttcttcagcacatagtacacagaaggattctagtcatagagccaagttaccattagcaaaggagaaatataagagtgataaagactccacttccaccaggcttgagagaaagttgtcagatggccacaaaagcagaagcttaaagcatagtagtaaagacataaaaaagaaggacgaaaataaatcagatgacaaggatggtaaagaagttgacagtagtcatgaaaaggccagaggtaatagttcactcatggaaaagaaattaagtagaaggttgtgcgaaaatcggagaggaagcttgtcacaagaaatggccaaaggagaagaaaaattagcagcaaacactttgagcactcccagcggttcctcccttcagagaccaaaaaagagtggtgatatgacattgatccctgaacaagagccaatggaaattgattctgagccaggtgttgaaaatgtgtttgaagtatctaaaacccaagacaaccgcaataataattctcagcaagacattgactctgaaaatatgaaacaaaaaacttctgccactgttcaaaaggatgaattgagaacttgcacagcagattcaaaagcaacagctccagcttataagccaggccgtggaacaggagttaatagtaattctgaaaagcatgccgatcatagaagcaccttgaccaagaaaatgcatatacaaagtgctgtgtccaaaatgaaccctggggagaaagaacccattcatagaggaactactgaagtgaatatagattctgaaactgttcatagaatgttactgagtgccccatcagaaaatgatagggtacagaagaatttgaaaaacacagctgctgaagaacatgttgctcaaggagatgccactcttgaacattccacaaatttagactcctcaccatccttaagttcagtgactgttgtgcctctgagggaatcgtatgatccagatgtaattcctctgtttgacaaaagaactgttttggaaggtagcacagccagcacctcccctgcggatcactctgctctccctaaccaaagtctgactgttagggaatcagaagtccttaagacaagtgacagcaaagaaggtggtgaaggtttcacagtagatacaccagcaaaagcaagcatcactagcaaaagacacattccagaagctcaccaggctactttattggatggtaaacaaggaaaggtaatcatgcctcttggaagtaagttaacgggcgtgattgtggaaaatgagaatattaccaaagaaggtggcttagtggacatggccaagaaagaaaatgacttaaatgcagagcccaatttaaagcagacaattaaagcaacagtagagaatggcaagaaggatggcattgctgttgatcatgttgtaggcctgaatacagaaaaatatgctgaaactgtcaaacttaagcataaaagaagcccaggtaaagtaaaagacatatcaattgatgttgaaagaaggaatgaaaacagtgaggtagacaccagtgctggaagtggctctgcaccctctgttttacaccaaaggaacggacaaactgaggatgtggcaactgggcctaggagagcagaaaagacttctgttgccactagtactgaagggaaggacaaagatgtcaccttaagtccagtgaaggctgggcctgccacaaccacttcttcagaaacaagacaaagtgaggtggctttgccttgcaccagcattgaggcagatgaaggcctcataataggaacacattccagaaataatcctcttcatgttggtgcagaagccagtgaatgcactgtttttgctgcagctgaagaaggtggggctgttgtcacagagggatttgctgaaagtgaaaccttcctcacaagcactaaggaaggggaaagtggggagtgtgctgtggctgaatctgaggacagagcagcagacctactggctgtgcatgcagttaaaatcgaagccaatgtaaatagcgttgtgacagaggaaaaggatgatgctgtaaccagtgcaggctctgaagaaaaatgtgatggttctttaagtagagactcagaaatagttgaaggaactattacttttattagtgaagttgaaagtgatggagcagttacaagtgctggaacagagataagagcaggatctataagcagtgaagaggtggatggctcccagggaaatatgatgagaatgggtcccaaaaaagaaacagagggcactgtgacatgtacaggagcagaaggcagaagtgataactttgtgatctgctcagtaactggagcagggccccgggaggaacgcatggttacaggtgcaggtgttgtcctgggagataatgatgcaccaccaggaacaagtgccagccaagaaggagatggttctgtgaatgatggtacagaaggtgagagtgcagtcaccagcacggggataacagaagatggagaggggccagcaagttgcacaggttcagaagatagcagcgaaggctttgctataagttctgaatcggaagaaaatggagagagtgcaatggacagcacagtggccaaagaaggcactaatgtaccattagttgctgctggtccttgtgatgatgaaggcattgtgactagcacaggcgcaaaagaggaagacgaggaaggggaggatgttgtgactagtactggaagaggaaatgaaattgggcatgcttcaacttgtacagggttaggagaagaaagtgaaggggtcttgatttgtgaaagtgcagaaggggacagtcagattggtactgtggtagagcatgtggaagctgaggctggagctgccatcatgaatgcaaatgaaaataatgttgacagcatgagtggcacagagaaaggaagtaaagacacagatatctgctccagtgcaaaagggattgtagaaagcagtgtgaccagtgcagtctcaggaaaggatgaagtgacaccagttccaggaggttgtgagggtcctatgactagtgctgcatctgatcaaagtgacagtcagctcgaaaaagttgaagataccactatttccactggcctggtcgggggtagttacgatgttcttgtatctggtgaagtcccagaatgtgaagttgctcacacatcaccaagtgaaaaagaagatgaggacatcatcacctctgtagaaaatgaagagtgtgatggtctcatggcaactacagccagtggtgatattaccaaccagaatagcttagcagggggtaaaaatcaaggcaaagttttgattatttccaccagtaccacaaatgattacacccctcaggtaagcgcaattacagatgtggaaggaggtctctcagatgctctgagaactgaagaaaatatggaaggtaccagagtaaccacagaagaatttgaggcccccatgcccagtgcagtctcaggagatgacagccaactcactgccagcagaagtgaagagaaagatgagtgtgccatgatttccacaagcataggggaagaattcgaattgcctatctccagtgcaacaaccatcaagtgtgctgaaagtcttcagccggttgctgcagcagtggaagaaagggctacaggtccagtcttgataagcaccgccgactttgaggggcctatgcccagtgcgcccccagaagctgaaagtcctcttgcctcaaccagcaaggaggagaaggatgaatgtgctctcatttccactagcatagcagaagaatgtgaggcttctgtttccggtgtagttgttgaaagtgaaaatgagcgagctggcacagtcatggaagaaaaagacgggagtggcatcatctctacgagctcggtggaagactgtgagggcccagtgtccagtgctgtccctcaagaggaaggcgacccctcagtcacaccagcggaagagatgggtgacaccgccatgatttccacaagcacctctgaagggtgtgaagcagtcatgattggtgctgtcctccaggatgaagatcggctcaccatcacaagagtagaagacttgagcgatgctgccatcatctccaccagcacagcagaatgtatgccaatttccgccagcattgacagacatgaagagaatcagctgactgcagacaacccagaagggaacggtgacctgtcagccacagaagtgagcaagcacaaggtccccatgcccagcctaattgctgagaataactgtcggtgtcctgggccagtcaggggaggcaaagaaccgggtcccgtgttggcagtgagcaccgaggaggggcacaacgggccatcagtccacaagccctctgcagggcaaggccatccaagtgctgtttgtgcggaaaaagaagagaagcatggcaaggagtgccccgaaataggaccatttgcaggaagaggacagaaagagagcactttacacctcataaatgcagaagagaagaatgtattgttgaactcccttcagaaagaagataagagcccagagacagggacagcagggggcagtagcacagcaagttattcagcaggaaggggcttagaggggaatgctaactcacctgcccacctgagaggaccagaacagacgtctgggcagacggctaaggatccctctgtcagcattcgctatttggcagcagtaaacaccggtgctataaaagctgatgacatgccacctgttcaagggaccgtggctgagcattcctttcttcctgctgagcagcaggggtctgaagacaacttgaaaaccagtaccaccaaatgtattactggccaagaatcaaaaattgctccttcccacacaatgatccctccagctacttacagtgtagctctgttggctcctaaatgtgagcaggacttgactataaagaatgattatagtggcaaatggactgatcaagcatctgctgagaaaacaggagatgataacagcacaaggaaatcattccctgaggaaggagacataatggttactgtgtcttctgaagaaaatgtgtgtgacataggcaatgaagagtctccattgaatgttttgggaggattgaaactgaaagccaacttgaaaatggaggcttatgtgccttcagaggaagagaaaaatggtgaaattctggcaccaccagaaagtctgtgtgggggaaagccaagtggaatagctgaactccagagggagcctttgttggtgaatgaatcactaaatgttgaaaattcaggcttcagaacaaatgaagaaattcatagcgaatcttataacaaaggagagatatccagtggtagaaaagacaacgcagaagccataagcggtcacagtgttgaagcagatcctaaagaggttgaagaggaagaaaggcatatgcctaaaagaaaaagaaagcagcattatctctcttcagaagatgaaccagatgataatccagatgtcctggattccagaatagaaacagcacaaaggcagtgtcctgaaacggagccacatgacacaaaggaagagaactccagagatttggaagaattacctaaaaccagttctgagacaaatagcactacctcaagggtcatggaagaaaaagatgaatatagcagcagtgaaactactggtgaaaagccagagcagaacgatgatgacaccataaaatctcaggaggaagatcagccaataattattaaaaggaaaagaggaagacctcgcaaataccctgtagaaacaacgttaaaaatgaaagacgactccaaaacagatactggcattgtcactgtagaacaatctccatctagcagcaaactgaaagtaatgcaaacagatgaatccaataaagaaacagctaacctacaagaaagaagtataagcaatgatgatggtgaagaaaaaatagtaacaagtgtgcgtcggagaggaagaaaacccaaacgttctctcactgtatcagatgatgctgaatcctcagagccagaaagaaaacgccagaaatcagtttctgatccagtggaggacaagaaagagcaggagtctgatgaggaagaggaagaagaggaagaggacgagccttcaggagccaccacaagatccaccaccagatcagaggctcagagatcaaagacacagctctccccttctatcaagcgcaagagagaagtcagccctcctggggcccgaacaagaggccagcaaagggtggaggaagcccctgtgaaaaaagcgaagcgataatcctgaccactgctgccctaggcttatggaggaacacggtggagaggaaagagacatgccttggtggccataggcttctctttaaccaggaaaaagatatgcatgtgctgtaagtccctaggtgcaagctttttcttgttatgttttaaacagctttataaactattgttcatagaagatattatgtacatttatttcagataaaggacaataagtttactttgtatctgaactcaaaacaaagtagttgtatattttaacattcaaaattgggatttcccaatgtgacacatcatgaatgcaaacccctccagcccatcagacgccaggctgcctactggtaatctgtgtatagtatataaacatgtaaaaataggttgtattttactctatgtatgatgctaatcaatgaacactttatttattttacagagaaaacttatctgtgaactttactatatatctgtttattttactttattttttttttaaataaaaagggttttaaatgctatgcagtcattagtagaaaattttttaggactctgcctgctctgtaactatcttaatatgatctggcagaaactcgcatgtatccaagtaaagtagtttagctaaagaaaggttcttcattgcttttctgttcacagttgtggctctgttttttaagaatgtaacttgtttttagattatacttgcatctgtgactttactaccagccacgttgacacaaaacaggttctggttcaggtaaagttgcgtcagtcacctgcagcagaaatccctcttcattcctcttctctgtgttcattcctcttctgtgctgttctgaagcttctaccaatactctttccatattgtctttttcagtgaagagaaatgcattcaagattaggtccctcctgtctatccagtttcaggattttatgttgttttatacacagttatttcagtatagaaactggctttattgccaagtgtttttttaaacatgttttaactctcatatgagcaaactgtccaacttcagtttttcataagattaaacttcttacgatcaaatttgtctcttgcaatgatgtgatgagttgccaaataattgagattattttaaaatgttttgttcatattcttgttttataattaaaatttacattcagtgtgtatgggtttttttttttattttgactcttaatgtaaggtggatatttctgtcattttacatggtttcttactgagattttatatataaattataaaatgtttaccaaaaaaaaaaaaaaaaaaa

SEQ ID NO: 62 - protein, 3051 aa, Homo sapiens [sequence omitted]

SEQ ID NO: 63 - DNA, 2416 bp, Homo sapiens
  CDS (156)..(950)
ccacgaccaatgatatgaaatacaacgatggtttttcatatcattggtcgtggctgtagtccgtgcgagaataatgatgtatgctttgtttctgttgagtgtgggcgcttgccccgggggtctgtcgcgtcgcaggcgccgccggagccctggccatgaggaccctgtggatggcgctgtgcgcgctgtcgcggctgtggcccggggcccaggccggctgcgccgaggccgggcgctgctgtcccggccgggaccccgcctgcttcgcccgcggctggaggctggacagggtctacgggacgtgtttctgcgaccaagcctgtcgcttcaccggggactgctgcttcgactacgacagggcgtgcccagctcgcccgtgcttcgtgggggaatggagcccctggagtggttgtgcagaccagtgcaagcctacaacccgtgtgcggaggcgctcggtgcagcaggagcctcagaacggcggggcgccctgcccacccctggaagagagagctggctgcctggagtactccaccccgcagggccaggactgcgggcacacctatgttcctgcctttataactacctctgcattcaacaaggagagaacacgacaagctacgtctccacactggtctacacacacagaggatgctggatactgtatggagtttaagacagagtccttgactcctcactgtgctctggaaaactggcccttgactagatggatgcagtatctccgagagggatacacggtgtgtgtggattgtcagcctccagctatgaactctgtgagccttcgttgttctggagatggcctggactccgatggaaatcagactctccattggcaagcaattggtaatcctcggtgtcaaggaacttggaaaaaagttcggcgagtagaccagtgttcttgtccagctgttcacagttttatttttatatagatggtgatataaatatttccaaatgcatttgtaaacattctaaatattctcaagtcatgttcaatgtttcctaaaccttcaattttggccaaagtccccaaacacatcattgccacactctgaagtagagaaagaaaatttaggggccagttctcaaggaacacaggtcctttatttttattttaactaagttgaagacccactcaaaaagctcttgtggttttatgttcttgacctttcaactggagtcctctcattcagcaggtggcccgtgagacacagaatacatgtctgtttgctaaagtaaaattactgtaactcagtccgattattggtgacggaagtgtcatttaaggggatctatgttttgaaccttgcagtctattttataatcttttaaaagtttctcactttaaaacatgtatacaggtatgcacactctacacatatatttccatatatttaatattccataaattctgaaataatttcaagcaaattatcacaaataatttttccacagggcaaattatttaaaattttagtaagcattctgtaatgaaaaaccaagttatactaaaaacattttttgaagaagaaatttttttttttgcttaagaagtgaaaggatcaaatgctcattgtaggtcaatgggagttcttttaaatgttataattttcatgaaaagaaatgttgacaccagtgaatgaaacaattgctttcattctgaaaattctaccaccatttgcatctaagattatttccaaggcttaaagcctgaagctgaataaaataatctttcagagtccagcttcaagtttagttgatgtaagctcactatttttttcctaccgcatgcattttctaatgtttggggtggatggtgtgtcggttatggaaggcatagacgtcattacaggtgctacgatctcacacacacacaaggaaatgttagtctccttattttatgattggaaaatcaatgacctagaggcaaaatggcatgtttaaggacctgggatgacaagtcattctgcagtcagccacagagccaaatttggactcctcaaccagaactccatgaaaagcctgactttgccaaacactgtgctggaaaagctaagcccctttcatttgtgaagtaaattttaaattcaagatatttagtttagagaattgagtcttgagatgtaaactacatgagatttctttggtttcaattgaataatattcactaacaaatgatttactaaaatacgtatttcttggtccttatcatgtaatgacagattcacaacagcaataaggatggagatttccccaataattaataacaccgagagtagcaatattttttactgtattttcatttaattgtcaaagttgtttttgtggaaaattaaattcttcagaaattaaaaaaaaaaaaaaaaaaaaaaaaaaaaaaaaaaaaaaaaaaaaaaaa

SEQ ID NO: 64 - protein, 264 aa, Homo sapiens
MRTLWMALCALSRLWPGAQAGCAEAGRCCPGRDPACFARGWRLDRVYGTCFCDQACRFTGDCCFDYDRACPARPCFVGEWSPWSGCADQCKPTTRVRRRSVQQEPQNGGAPCPPLEERAGCLEYSTPQGQDCGHTYVPAFITTSAFNKERTRQATSPHWSTHTEDAGYCMEFKTESLTPHCALENWPLTRWMQYLREGYTVCVDCQPPAMNSVSLRCSGDGLDSDGNQTLHWQAIGNPRCQGTWKKVRRVDQCSCPAVHSFIFI

SEQ ID NO: 65 - DNA, 4372 bp, Homo sapiens
  CDS (78)..(1922)
cagtcctcgaccccccgcacctcgccccttccccaccccctcctccgcctcggtgcccggcgctgctccggaccactatgaccatgagatccgcggtgttcaaggcggccgcggcccctgccggcggcaatcctgagcagcgactggactacgagcgggctgcggcgctgggcgggcccgaggacgagcctggggcggccgaagcccacttcctcccccggcaccgtaagctcaaggagccggggcccccgctggcctcctcccagggcgggagccccgcgccttccccggccggctgcggcggcaagggccggggcttgttactcccggccggggcggcccccgggcagcaggaagagagctggggcggttcggtgcccttgccctgtccgcccccggccaccaagcaagccggcattgggggggagcctgccgcagccggagccggctgcagcccccggcccaagtatcaggcggtgctgcccattcagacgggctctctcgtggcggcggccaaagagcctacgccctgggctggggacaagggtggggcggcctcccccgctgccaccgcctcggacccggcgggacccccaccactacctctgcccgggccgccacccctcgcgcccaccgccaccgccgggaccctggcggccagcgagggcagatggaagagtatgaggaagagccctctcgggggtggtggcggctcgggagcctccagtcaggccgcctgcctcaaacagatccttctgctgcaattggacctcatcgaacagcagcagcagcagctgcaggccaaggaaaaggagatcgaggagctgaagtcagagagagacacgctccttgctcggattgaacgtatggaaaggcggatgcagctggtaaagaaggataacgagaaagaaaggcacaagctgtttcagggctatgaaactgaagagagagaggaaacagagctatctgagaaaattaaactggagtgccagccggagctttccgagacatcccagactctgcctcccaagcccttctcatgtgggcggagtggaaagggacataaaaggaaatccccatttggaagtacagaaagaaagactcctgttaaaaagctggctcctgaattttcaaaagtcaaaacaaaaactcctaagcactctcctattaaagaggaaccctgtggttccttatctgaaactgtttgtaaacgtgaattgaggagccaagaaaccccagaaaagccccggtcttcagtggacaccccaccaagactctccactccccaaaagggacccagcacccatcccaaggagaaagccttctcaagtgagatagaagatttgccgtacctttccaccacagaaatgtatttgtgtcgttggcaccagcctcccccatcaccgttaccattacgggaatcctctccaaagaaggaggagactgtagcaaggtgtctgatgccatcaagtgttgcaggagaaacttcagtcttggctgttccttcttggagggaccactcagtagagcctctaagggacccaaatccttcagaccttttggagaacctggatgacagtgtgttttcgaagcggcatgcaaaactggagctggatgagaagagaaggaaaagatgggatattcagaggatcagggaacaaagaattttacagcgactgcagctcagaatgtataaaaagaaaggaattcaggaatctgagcctgaggttacctcatttttccctgagccagatgatgttgaaagtttgatgattacccccttcttgcctgttgtagcatttggacgaccattaccaaaattaactccacagaattttgagctaccctggttggatgagcgtagccgatgcagattggagatccagaagaagcaaacacctcaccggacgtgtaggaaatagctgtgctggcaagaaccctgtcttcagatagttgtagcatgccattcccgagagtggcagagacctgtatatgtgacctttgtcctcacatatgttatcactcgctgataataccctttcatacttccttgactttgttttcattactctgatttcacaaaaactctttcattcggctaattgtgagttatggagggtgattgggatttcttttcccttttttgggaaatgggctctcaagctaaagctataggatggcagattcagaagtttcaggggtctgtttctatacatttgcctatgttaaaggggtaaaagggctctcttcattagacatgtggaagatgaagcagccccttcctttagagctgtgcctgcatggcactcttctcaccctggtacaccctccttatagtgggtatagtgatttttaaccctaaaataaaacaaacaacctcaccatgagctttaggaccagaagaggaatgacaagtgaagcgatgaagcaagccatcttcacagagtagaaaagacatcggagagttggtagataactgtctgaaaagatagttgttcatttgaaactattctgtgatacagtcatgtgggaagggatgtttggctgtgattattttttcagttaatggataacaatttctttactgctcaaaaaccaaaatctttggaaaagaaagtggggatggttagtttcagaacaagttacagctgtaaacaaaagcacttagtatttgggatggcatgccaaaacctgtataaatgtccttgtatcacatcacttctcaagtattccttcattgggcttcatccttttagcagaactcttggtggtgggatagagacttagggagggtagggggagagtgtggaaataggtgcttcctttggctggcaaatgtctacatcttgaaacaaacagatgtacctaatgagcttctccattcactttgtaaaaataatttgtatgtgtaccatcttggtcctctcccctcccgttttgttaaaatatcaggatagcactcccaggccactttggtctcagtgtaagatccctattaactatctgaaaggaaaatagagccaagacctctggtctcaaatatataggaattgcctttctttagtcttcaggactattgtgtgaaaacaagtaggggtctaatctcctagaaggtaggggcttttatccttaaagagaatatgtccccagattattagcacttttagaggagaagccaaggtatgtagggtgtgtggctggcccatcagtggagcacgaagagagaatgggataccattgtgggaagagaagaaaagttcctcaggggcctcccactgctaaagttttttgtgagatgttgatctgtgcttcctggatttgacttttaaaggaattattctggcagcacatgtagtattcttggatgatcttgctgctcttatttctccttttgtgtgtgtgtgtgtgtgtgtgtggctatgggttttcatttgtaactccatctgcttaggagagtgggctctctataagggaacctgctgtaaacttcattgcagcaaggatgtagagagaaataggacttaattccactaggggctctcatctcacaccttaaggaggagatttctagaaaaactgggccagattttctttgttctccatcattttaatgtggcaggctgttcagttttcttactcttacctatgtgatatttcttcgtaacgtgtccaaaaagaaaaaagacccaatcagtgtctcttgactttgttctttgatccctcagtttcttcttgatttcagcatgtgtcgggttcctaattttgggtatgagttagcaaatttaaccattgtgtttgtgccctacccaggggactccccagtttctgacttgaagtagactgagaagaatccacgaggtgctatctggccagatttaagtagattctatttccttggttctccctctccctgaggacctcttattttattgtcccctcttctaggttaattctcctttgatttgactttgttgagaaggaggttggacagtagattagcaaagttccaagtgcaaaattacagtgtgttagagtgtggggggaaaattagtcttatttttccctacatgggatacaacactgtgaattcaatcttcaactgaaggccctgcagttctcctaaaacatagttgtttgtttttctttaacaaagtttaagctagtgttaataaattaaaaaaaattgcttgtctgtctacttcagctttgttttatgcccatttcatattgttgtctgtgttgtaattcataacttttgataccatttctgatgtgtaaaattggttgtcttgtaaatatcttataaagagttcaattgtaaataaactattgtggctgttaaaaaaaaaaaaaaaaaaaaaaaaaaaaaaaa

SEQ ID NO: 66 - protein, 614 aa, Homo sapiens
MTMRSAVFKAAAAPAGGNPEQRLDYERAAALGGPEDEPGAAEAHFLPRHRKLKEPGPPLASSQGGSPAPSPAGCGGKGRGLLLPAGAAPGQQEESWGGSVPLPCPPPATKQAGIGGEPAAAGAGCSPRPKYQAVLPIQTGSLVAAAKEPTPWAGDKGGAASPAATASDPAGPPPLPLPGPPPLAPTATAGTLAASEGRWKSMRKSPLGGGGGSGASSQAACLKQILLLQLDLIEQQQQQLQAKEKEIEELKSERDTLLARIERMERRMQLVKKDNEKERHKLFQGYETEEREETELSEKIKLECQPELSETSQTLPPKPFSCGRSGKGHKRKSPFGSTERKTPVKKLAPEFSKVKTKTPKHSPIKEEPCGSLSETVCKRELRSQETPEKPRSSVDTPPRLSTPQKGPSTHPKEKAFSSEIEDLPYLSTTEMYLCRWHQPPPSPLPLRESSPKKEETVARCLMPSSVAGETSVLAVPSWRDHSVEPLRDPNPSDLLENLDDSVFSKRHAKLELDEKRRKRWDIQRIREQRILQRLQLRMYKKKGIQESEPEVTSFFPEPDDVESLMITPFLPVVAFGRPLPKLTPQNFELPWLDERSRCRLEIQKKQTPHRTCRK

SEQ ID NO: 67 - DNA, 2179 bp, Homo sapiens
  CDS (169)..(1917)
caagctctaatacgactcactatagggaaagctggtacgcctgcaggtaccggtccggaattcccgggtcgacccacgcgtccggccgagagaagcagtagtcaataaagagagtgccgtatttcgcagattggagctgagctgtggctgccagaagatagcgaacgaatggaaactgaaagtggaaatcaggaaaaggtaatggaagaagaaagcactgaaaagaaaaaagaagttgaaaaaaagaaacggtcacgagttaaacaggtgcttgcagatattgctaagcaagtggacttctggtttggggatgcaaatcttcacaaggatagatttcttcgagaacagatagaaaaatctagagatggatatgttgatatatcactacttgtgtcttttaacaaaatgaaaaaattgactactgatgggaagttaattgccagagcattgagaagttcagctgttgtagagcttgatttggaaggcaccagaatccggaggaaaaaacctctgggggaaagaccaaaggatgaggatgaacgcacagtgtatgtggagttacttcccaaaaatgttaatcacagctggattgaaagagtatttgggaaatgtggcaatgttgtttatataagtataccacattataagtctactggagatccaaaggggtttgcgtttgtggaatttgaaacaaaagaacaagcagcaaaagcaattgagtttcttaacaacccaccagaagaagcaccaagaaaacctggcatatttcctaaaacagtgaaaaataagcccattccagccttaagagttgtggaagagaagaaaaagaaaaagaagaagaaaggcagaatgaaaaaggaagacaatatccaagccaaagaagaaaacatggacacaagcaacaccagcatcaccaaaatgaaaagatccagacccacatctgagggctctgacattgagtccactgaaccccaaaagcagtgctcaaagaaaaagaaaaaacgggacagagttgaagcatctagcttacctgaagtcagaacagggaagaggaagagaagcagctctgaagatgcagaatccctagctccccgatcaaaagtaaagaaaattattcagaaagacatcattaaggaagcatcagaagcttccaaggaaaatagagatatagaaatctctactgaagaggaaaaggatactggagatctaaaagatagctctctcttgaaaacaaaaaggaaacataagaaaaaacataaagagagacataaaatgggagaagaagttataccattaagagtgctatcaaagagcgaatggatggatttgaaaaaagagtatttagcgctacaaaaagctagcatggcttctttaaaaaaaacaatatcccaaataaaatcagagtcagaaatggaaacagacagtggagtacctcaaaacactggaatgaaaaatgaaaaaacagccaacagggaagagtgtcgcacccaggagaaagttaatgcaacaggaccacagttcgtgagtggagtgattgtgaagatcattagcacagagcctctacctggcaggaaacaagtccgggatactttggcagcaatctcagaagttctttatgttgatttgctagaaggggatacagaatgccatgctagatttaagactcctgaggatgctcaagcagtaataaatgcctatacagaaattaacaaggaacactgctggaaactcgagatcctttctggtgatcacgaacaaaggtattggcagaagattttggttgatagacaggcaaaacttaatcagcctcgggaaaagaaaagaggcactgaaaagttaatcaccaaagctgaaaagattagactggcaaagactcaacaagcgagtaaacatataagattttctgaatatgattgaaaaaaaaaacagttcacctcttaatacttcacaagatacttgagctgttcttgggagattcacttttattatggtagcactgcataattaatgtgtttttaattaaaagaaatatctttgttccttaacttgtaaataagacttttttctagagacaaatatgatgtataccacaatttttcttaaacattttatttgttgaaattatcttagatgtcagtgtcaggtgatttagtaaataaatgtgttttgaacattaaaa

SEQ ID NO: 68 - protein, 582 aa, Homo sapiens
METESGNQEKVMEEESTEKKKEVEKKKRSRVKQVLADIAKQVDFWFGDANLHKDRFLREQIEKSRDGYVDISLLVSFNKMKKLTTDGKLIARALRSSAVVELDLEGTRIRRKKPLGERPKDEDERTVYVELLPKNVNHSWIERVFGKCGNVVYISIPHYKSTGDPKGFAFVEFETKEQAAKAIEFLNNPPEEAPRKPGIFPKTVKNKPIPALRVVEEKKKKKKKKGRMKKEDNIQAKEENMDTSNTSITKMKRSRPTSEGSDIESTEPQKQCSKKKKKRDRVEASSLPEVRTGKRKRSSSEDAESLAPRSKVKKIIQKDIIKEASEASKENRDIEISTEEEKDTGDLKDSSLLKTKRKHKKKHKERHKMGEEVIPLRVLSKSEWMDLKKEYLALQKASMASLKKTISQIKSESEMETDSGVPQNTGMKNEKTANREECRTQEKVNATGPQFVSGVIVKIISTEPLPGRKQVRDTLAAISEVLYVDLLEGDTECHARFKTPEDAQAVINAYTEINKEHCWKLEILSGDHEQRYWQKILVDRQAKLNQPREKKRGTEKLITKAEKIRLAKTQQASKHIRFSEYD

SEQ ID NO: 69 - DNA, 2060 bp, Homo sapiens
  CDS (50)..(1798)
gtccgaaggccgcagtacttgaccctgtattttgggagtcgaacggagaatggaaactgaaagtggaaatcaggaaaaggtaatggaagaagaaagcactgaaaagaaaaaagaagttgaaaaaaagaaacggtcacgagttaaacaggtgcttgcagatattgctaagcaagtggacttctggtttggggatgcaaatcttcacaaggatagatttcttcgagaacagatagaaaaatctagagatggatatgttgatatatcactacttgtgtcttttaacaaaatgaaaaaattgactactgatgggaagttaattgccagagcattgagaagttcagctgttgtagagcttgatttggaaggcaccagaatccggaggaaaaaacctctgggggaaagaccaaaggatgaggatgaacgcacagtgtatgtggagttacttcccaaaaatgttaatcacagctggattgaaagagtatttgggaaatgtggcaatgttgtttatataagtataccacattataagtctactggagatccaaaggggtttgcgtttgtggaatttgaaacaaaagaacaagcagcaaaagcaattgagtttcttaacaacccaccagaagaagcaccaagaaaacctggcatatttcctaaaacagtgaaaaataagcccattccagccttaagagttgtggaagagaagaaaaagaaaaagaagaagaaaggcagaatgaaaaaggaagacaatatccaagccaaagaagaaaacatggacacaagcaacaccagcatcaccaaaatgaaaagatccagacccacatctgagggctctgacattgagtccactgaaccccaaaagcagtgctcaaagaaaaagaaaaaacgggacagagttgaagcatctagcttacctgaagtcagaacagggaagaggaagagaagcagctctgaagatgcagaatccctagctccccgatcaaaagtaaagaaaattattcagaaagacatcattaaggaagcatcagaagcttccaaggaaaatagagatatagaaatctctactgaagaggaaaaggatactggagatctaaaagatagctctctcttgaaaacaaaaaggaaacataagaaaaaacataaagagagacataaaatgggagaagaagttataccattaagagtgctatcaaagagcgaatggatggatttgaaaaaagagtatttagcgctacaaaaagctagcatggcttctttaaaaaaaacaatatcccaaataaaatcagagtcagaaatggaaacagacagtggagtacctcaaaacactggaatgaaaaatgaaaaaacagccaacagggaagagtgtcgcacccaggagaaagttaatgcaacaggaccacagttcgtgagtggagtgattgtgaagatcattagcacagagcctctacctggcaggaaacaagtccgggatactttggcagcaatctcagaagttctttatgttgatttgctagaaggggatacagaatgccatgctagatttaagactcctgaggatgctcaagcagtaataaatgcctatacagaaattaacaaggaacactgctggaaactcgagatcctttctggtgatcacgaacaaaggtattggcagaagattttggttgatagacaggcaaaacttaatcagcctcgggaaaagaaaagaggcactgaaaagttaatcaccaaagctgaaaagattagactggcaaagactcaacaagcgagtaaacatataagattttctgaatatgattgaaaaaaaaaacagttcacctcttaatacttcacaagatacttgagctgttcttgggagattcacttttattatggtagcactgcataattaatgtgtttttaattaaaagaaatatctttgttccttaacttgtaaataagacttttttctagagacaaatatgatgtataccacaatttttcttaaacattttatttgttgaaattatcttagatgtcagtgtcaggtgatttagtaaataaatgtgttttgaacattaaaa

SEQ ID NO: 70 - protein, 582 aa, Homo sapiens; identical to SEQ ID NO: 68

SEQ ID NO: 71 - DNA, 8426 bp, Homo sapiens
  CDS (261)..(7391)
cggagttaaccgaagagggggtcgaggagagccggagtcggggacccaggagtttcctgtgtccagcgctgccggagccgcctgaggtgccatgtttcagaacagagtaagacccctggtaaagaagaactgaagatattatacagataccagatatagcctaattacaaagaaagcattaacctgcctctgaggtgactaaaggggaataatggtgattttgcgccgggctcggccgcctgcttccgccccaaccagcaatgaatcttgactcgctctcgctggccttgtctcaaatcagctacctggtggacaatttaaccaagaaaaattaccgagccagccagcaggaaatacagcatattgtgaatcggcacggtcctgaggcagacaggcatttattacgctgcctattttcgcatgtggatttcagtggcgatggtaaaagcagtggcaaagatttccatcagactcagtttctgattcaggagtgtgcgttgctgattacaaagccaaattttatctcgacgctgtcctatgccattgataatccattgcactatcagaagagtttaaagcctgcaccccacttatttgcccagctgagtaaagtgctcaaattaagcaaagtacaagaggtaatttttggccttgccctgttgaattcttccagctcagatcttagaggtttcgctgcccagtttatcaaacagaagcttccagatcttctgcgttcttacattgacgcagacgtcagtggaaatcaagaaggtggcttccaagatatagcaatagaggtcctacacctcctcctctcccatctcctctttgggcagaagggagcctttggagttggacaagaacagatagacgcttttcttaagacgctgcgcagagattttccccaagaacgctgtcccgtggtgctcgcaccacttttataccctgaaaaacgggacattctaatggacaggatcctgcctgattccggaggggtatctaaaaccatgatggagagctctttggctgatttcatgcaagaagtaggctatggcttttgtgcaagtattgaagaatgtcgcaatataatcgtgcagtttggtgttcgggaggtcacagctgcccaggttgcaagggttttgggaatgatggctcgaactcattcaggattaacagatggcattccattacagagtatttctgctccgggcagtgggatctggagtgatgggaaagataaaagtgatggagcacaggcacacacatggaatgtagaagtcttgattgacgttcttaaagaactgaatccaagtttgaatttcaaggaagtaacttatgaactggaccatcctggatttcaaattcgtgacagtaaaggacttcataatgtggtttatggcattcagaggggtttgggtatggaagtgttcccagtagacctcatatatagaccttggaaacatgctgaaggccagctctccttcattcaacattcccttataaatccagagatcttctgttttgctgactatccctgtcatactgttgccactgatattctgaaagcaccaccagaggatgacaatcgagaaattgccacatggaagagcttggatttgattgaatctctgctgaggcttgcagaggttgggcagtatgagcaagtcaaacagctcttcagcttccctatcaaacactgtccagacatgctggtattggccttactacaaattaacacctcttggcataccttgcgccatgaacttatctccactctgatgccaattttccttggaaaccatcctaactcagctattattttgcactatgcatggcatgggcagggacagtctccctcaattcgccaacttatcatgcatgcaatggcagaatggtacatgagaggggagcagtatgatcaggccaaattgtctcgaatacttgatgtggcccaggacttgaaggccttgtcaatgctgctaaatggtactccatttgcctttgttattgaccttgctgcacttgcttcacgtcgtgaatacctcaaacttgataagtggctcacagataaaattcgagagcatggggagccttttatccaggcgtgtatgacttttttaaagagacggtgtccttctattttgggcggacttgccccagaaaaagaccagcccaaaagtgctcaacttcctccagaaactttggcgacaatgttggcctgtctgcaagcttgtgcagggagtgtttctcaggagctatcagaaactatcctcaccatggtagccaattgcagtaatgttatgaataaggccagacaaccaccacctggagttatgccaaaaggacgtcctcctagtgctagcagcttagatgccatttctcctgttcagattgaccctcttgctggaatgacatctcttagtataggtggttcagctgcccctcacacccagagtatgcagggttttcctccaaatttgggttctgcattcagtacccctcagtcaccagcaaaagcatttccacccctttcaacccccaatcagaccactgcattcagtggtattggaggactttcatcacagcttccagtaggtggtcttggcacaggcagcctgactggtataggaactggtgctcttggactccctgcagtgaataacgacccttttgtacagaggaaactgggcacctctggactgaatcagcctacattccagcagagtaagatgaaaccttcggacttgtctcaggtgtggccagaggcaaaccagcactttagtaaagagatagatgatgaagcaaacagctatttccagcgaatatataatcatccaccacatccaaccatgtctgttgatgaggtattagaaatgctgcagagatttaaagactctactataaagagggaacgagaagtatttaactgtatgctaaggaacttgtttgaagaatatcgtttttttccccagtatcctgataaagagttacatataacagcctgcctatttggtggtataattgagaaaggactggtcacttacatggcactaggtctggctctacgatatgttcttgaagccttacgcaagccttttggatccaaaatgtattatttcgggattgctgcactagatagatttaaaaacagattgaaggactatccccagtattgtcagcatttggcttctatcagtcactttatgcaatttccacatcatttacaggagtatattgagtatggacagcagtctagagatcctcctgtgaaaatgcaaggctctatcacaacccctggaagtattgcactggctcaggcccaggctcaggcccaggttccagcaaaagctcctcttgctggtcaagttagcactatggtaaccacctcaacaactaccactgttgctaaaacggttacggtcaccaggccaactggagtcagctttaagaaagatgtgccaccttctattaatactacaaatatagatacgttgcttgtggccacagatcaaactgagagaattgtggagcccccagaaaatatccaggagaaaattgcttttattttcaataatctctcacagtcaaatatgacacaaaaggttgaagagctaaaggaaacggtgaaagaagaatttatgccttgggtttcacagtatctggttatgaagagagtcagtattgagccaaactttcatagcctgtattcaaacttccttgacacgctgaagaatcctgaatttaacaagatggttctgaatgagacctacagaaacattaaagtgctcctgacctctgataaagctgcagccaatttctcagatcgttctttgctgaagaacttgggacattggctaggaatgatcacattagctaaaaacaaacccatcttacacactgacttggatgtgaaatcattgctgctagaggcttatgttaaaggacaacaagaattgctctatgtagtgccctttgttgccaaagtcttagaatctagcattcgtagtgtggtttttaggccaccaaacccttggacaatggcaattatgaatgtattagctgagctacatcaggagcatgacttaaagttaaacttgaagtttgaaatcgaggttctctgcaagaaccttgcattagacatcaatgagctaaaacctggaaacctcctaaaggataaagatcgcctgaagaatttagatgagcaactctctgctccaaagaaagatgtcaagcagccagaagaactccctcccatcacaaccacaacaacttctactacaccagctaccaacaccacttgtacagccacggttccaccacagccacagtacagctaccacgacatcaatgtctattcccttgcgggcttggcaccacacattactctaaatccaacaattcccttgtttcaggcccatccacagttgaagcagtgtgtgcgtcaggcaattgaacgggctgtccaggagctggtccatcctgtggtggatcgatcaattaagattgccatgactacttgtgagcaaatagtcaggaaggattttgccctggattcggaggaatctcgaatgcgaatagcagctcatcacatgatgcgtaacttgacagctggaatggctatgattacatgcagggaacctttgctcatgagcatatctaccaacttaaaaaacagttttgcctcagcccttcgtactgcttccccacaacaaagagaaatgatggatcaggcagctgctcaattagctcaggacaattgtgagttggcttgctgttttattcagaagactgcagtagaaaaagcaggccctgagatggacaagagattagcaactgaatttgagctgagaaaacatgctaggcaagaaggacgcagatactgtgatcctgttgttttaacatatcaagctgaacggatgccagagcaaatcaggctgaaagttggtggtgtggacccaaagcagttggctgtttacgaagagtttgcacgcaatgttcctggcttcttacctacaaatgacttaagtcagcccacgggatttttagcccagcccatgaagcaagcttgggcaacagatgatgtagctcagatttatgataagtgtattacagaactggagcaacatctacatgccatcccaccaactttggccatgaaccctcaagctcaggctcttcgaagtctcttggaggttgtagttttatctcgaaactctcgggatgccatagctgctcttggattgctccaaaaggctgtagagggcttactagatgccacaagtggtgctgatgctgaccttctgctgcgctacagggaatgccacctcttggtcctaaaagctctgcaggatggccgggcatatgggtctccatggtgcaacaaacagatcacaaggtgcctaattgaatgtcgagatgaatataaatataatgtggaggctgtggagctgctaattcgcaatcatttggttaatatgcagcagtatgatcttcacctagcgcagtcaatggagaatggcttaaactacatggctgtggcatttgctatgcagttagtaaaaatcctgctggtggatgaaaggagtgttgctcatgttactgaggcagatctgttccacaccattgaaaccctcatgaggattaatgctcattccagaggcaatgctccagaaggattgccccagctgatggaagtagtgcgatccaactatgaagcaatgattgatcgtgctcatggaggcccaaactttatgatgcattctgggatctctcaagcctcagagtatgatgaccctccaggcctgagggagaaggcagagtatcttctgagggaatgggtgaatctctaccattcagcagcagctggccgcgacagtaccaaagctttctctgcatttgttggacagatgcaccagcaaggaatactgaagaccgatgatctcataacaaggttctttcgtctgtgtactgaaatgtgtgttgaaatcagttaccgtgctcaggctgagcagcagcacaatcctgctgccaatcccaccatgatccgagccaagtgctatcacaacctggatgcctttgttcgactcattgcactgctcgtgaaacactcaggggaggccaccaacactgtcacaaagattaatctgctgaacaaggtccttggtatagtagtgggagttctccttcaggatcatgatgttcgtcagagtgaatttcagcaacttccctaccatcgaatttttatcatgcttctcttggaactcaatgcacctgagcatgtgttggaaaccattaatttccagacacttacagctttctgcaatacattccacatcttgaggcctaccaaagctcctggctttgtatatgcctggcttgaactgatttcccatcggatatttattgcaagaatgctggcacatacgccacagcagaaggggtggcctatgtatgcacagctactgattgatttattcaaatatttagcgcctttccttagaaatgtggaactcaccaaacctatgcaaatcctctacaagggcactttaagagtgctgctggttcttttgcatgatttcccagagttcctttgtgattaccattatgggttctgtgatgtgatcccacctaattgtatccagttaagaaatttgatcctgagtgcctttccaagaaacatgaggctccccgacccattcactcctaatctaaaggtggacatgttgagtgaaattaacattgctccccggattctcaccaatttcactggagtaatgccacctcagttcaaaaaggatttggattcctatcttaaaactcgatcaccagtcactttcctgtctgatctgcgcagcaacctacaggtatccaatgaacctgggaatcgctacaacctccagctcatcaatgcactggtgctctatgtcgggactcaggccattgcgcacatccacaacaagggcagcacaccttcaatgagcaccatcactcactcagcacacatggatatcttccagaatttggctgtggacttggacactgagggtcgctatctctttttgaatgcaattgcaaatcagctccggtacccaaatagccacactcactacttcagttgcaccatgctgtacctttttgcagaggccaatacggaagccatccaagaacagatcacaagagttctcttggaacggttgattgtaaataggccacatccttggggtcttcttattaccttcattgagctgattaaaaacccagcgtttaagttctggaaccatgaatttgtacactgtgccccagaaatcgaaaagttattccagtcggtcgcacagtgctgcatgggacagaagcaggcccagcaagtaatggaagggacaggtgccagttagacgaaactgcatctctgttgtacgtgtcagtctagaggtctcactgcaccgagttcataaactgactgaagaatcctttcagctcttcctgactttcccagccctttggtttgtgggtatctgccccaactactgttgggatcagcctcctgtcttatgtgggcacgttccaaagtttaaatgcatttttttgactcttggccaaaatttagaagatgctgtgaatatcattttgaacttgtgtaaatacatgaaagagaaaacctttgtctggaacttcttggctttgtgcaagctgtgtccaaggcaagtacataaactggtaccttgtaatgaagaggcagctgatgccatgcacttgtctgagggcatagctccatgtcttctgacattcctggtgtcccaaagaatagcaaaaagccagtttgaatattatgtaacttatttttttaatgtggacaggggaccttgaaaatcactaagttattaaaaatgtgggatgtgctagaattggatatgtccaggaacatgggaagggctcactattggaatcccatgagtttccattttgtctctacccaaacgtattccaaagctgactgcatttgtaccatcttatttcttttggggattatacacctcagccgcctgagatgggggtcagctctttatataaagggaaaccagaccaggcctaaagcccaccccctaccctcacccccacaatcctctcctgaaacttaaaaacagtgggaatataggaaagggaaccaaatctcattaattaattgttctcccccattaccccactgaatgaatggccatacaggctaagctgaataatgacaaagttgaaaggaccaatacagccccttttataaggattttgaatgttttgcaaatgtattggtccctgtgttgtattttgtagccttttcctgggcttcagctcccctacttcttgtatgtgtatgcatactgtagctaaccattaaagtcatgacacacaaaaaaaaaaaaaaaaaaaaaaaaaaa

SEQ ID NO: 72 - protein, 2376 aa, Homo sapiens
MNLDSLSLALSQISYLVDNLTKKNYRASQQEIQHIVNRHGPEADRHLLRCLFSHVDFSGDGKSSGKDFHQTQFLIQECALLITKPNFISTLSYAIDNPLHYQKSLKPAPHLFAQLSKVLKLSKVQEVIFGLALLNSSSSDLRGFAAQFIKQKLPDLLRSYIDADVSGNQEGGFQDIAIEVLHLLLSHLLFGQKGAFGVGQEQIDAFLKTLRRDFPQERCPVVLAPLLYPEKRDILMDRILPDSGGVSKTMMESSLADFMQEVGYGFCASIEECRNIIVQFGVREVTAAQVARVLGMMARTHSGLTDGIPLQSISAPGSGIWSDGKDKSDGAQAHTWNVEVLIDVLKELNPSLNFKEVTYELDHPGFQIRDSKGLHNVVYGIQRGLGMEVFPVDLIYRPWKHAEGQLSFIQHSLINPEIFCFADYPCHTVATDILKAPPEDDNREIATWKSLDLIESLLRLAEVGQYEQVKQLFSFPIKHCPDMLVLALLQINTSWHTLRHELISTLMPIFLGNHPNSAIILHYAWHGQGQSPSIRQLIMHAMAEWYMRGEQYDQAKLSRILDVAQDLKALSMLLNGTPFAFVIDLAALASRREYLKLDKWLTDKIREHGEPFIQACMTFLKRRCPSILGGLAPEKDQPKSAQLPPETLATMLACLQACAGSVSQELSETILTMVANCSNVMNKARQPPPGVMPKGRPPSASSLDAISPVQIDPLAGMTSLSIGGSAAPHTQSMQGFPPNLGSAFSTPQSPAKAFPPLSTPNQTTAFSGIGGLSSQLPVGGLGTGSLTGIGTGALGLPAVNNDPFVQRKLGTSGLNQPTFQQSKMKPSDLSQVWPEANQHFSKEIDDEANSYFQRIYNHPPHPTMSVDEVLEMLQRFKDSTIKREREVFNCMLRNLFEEYRFFPQYPDKELHITACLFGGIIEKGLVTYMALGLALRYVLEALRKPFGSKMYYFGIAALDRFKNRLKDYPQYCQHLASISHFMQFPHHLQEYIEYGQQSRDPPVKMQGSITTPGSIALAQAQAQAQVPAKAPLAGQVSTMVTTSTTTTVAKTVTVTRPTGVSFKKDVPPSINTTNIDTLLVATDQTERIVEPPENIQEKIAFIFNNLSQSNMTQKVEELKETVKEEFMPWVSQYLVMKRVSIEPNFHSLYSNFLDTLKNPEFNKMVLNETYRNIKVLLTSDKAAANFSDRSLLKNLGHWLGMITLAKNKPILHTDLDVKSLLLEAYVKGQQELLYVVPFVAKVLESSIRSVVFRPPNPWTMAIMNVLAELHQEHDLKLNLKFEIEVLCKNLALDINELKPGNLLKDKDRLKNLDEQLSAPKKDVKQPEELPPITTTTTSTTPATNTTCTATVPPQPQYSYHDINVYSLAGLAPHITLNPTIPLFQAHPQLKQCVRQAIERAVQELVHPVVDRSIKIAMTTCEQIVRKDFALDSEESRMRIAAHHMMRNLTAGMAMITCREPLLMSISTNLKNSFASALRTASPQQREMMDQAAAQLAQDNCELACCFIQKTAVEKAGPEMDKRLATEFELRKHARQEGRRYCDPVVLTYQAERMPEQIRLKVGGVDPKQLAVYEEFARNVPGFLPTNDLSQPTGFLAQPMKQAWATDDVAQIYDKCITELEQHLHAIPPTLAMNPQAQALRSLLEVVVLSRNSRDAIAALGLLQKAVEGLLDATSGADADLLLRYRECHLLVLKALQDGRAYGSPWCNKQITRCLIECRDEYKYNVEAVELLIRNHLVNMQQYDLHLAQSMENGLNYMAVAFAMQLVKILLVDERSVAHVTEADLFHTIETLMRINAHSRGNAPEGLPQLMEVVRSNYEAMIDRAHGGPNFMMHSGISQASEYDDPPGLREKAEYLLREWVNLYHSAAAGRDSTKAFSAFVGQMHQQGILKTDDLITRFFRLCTEMCVEISYRAQAEQQHNPAANPTMIRAKCYHNLDAFVRLIALLVKHSGEATNTVTKINLLNKVLGIVVGVLLQDHDVRQSEFQQLPYHRIFIMLLLELNAPEHVLETINFQTLTAFCNTFHILRPTKAPGFVYAWLELISHRIFIARMLAHTPQQKGWPMYAQLLIDLFKYLAPFLRNVELTKPMQILYKGTLRVLLVLLHDFPEFLCDYHYGFCDVIPPNCIQLRNLILSAFPRNMRLPDPFTPNLKVDMLSEINIAPRILTNFTGVMPPQFKKDLDSYLKTRSPVTFLSDLRSNLQVSNEPGNRYNLQLINALVLYVGTQAIAHIHNKGSTPSMSTITHSAHMDIFQNLAVDLDTEGRYLFLNAIANQLRYPNSHTHYFSCTMLYLFAEANTEAIQEQITRVLLERLIVNRPHPWGLLITFIELIKNPAFKFWNHEFVHCAPEIEKLFQSVAQCCMGQKQAQQVMEGTGAS

SEQ ID NO: 73 - DNA, 3664 bp, Homo sapiens
  CDS (425)..(2800)
tgttgggaggagggtcgaagcgtatactggccacgcccgggtcccgctctctcgttgcacaactgcaagctagatctgggcatcgaaggaggaacgctgcaacctccaaccccttctttctgaccaaccgggaccagagcagtgctggggccggggcgggtcaccgggtgaggaccggggcggagggtgttaagttacagggcaggagcccgggtccctccgcgggcaggaaggggagggcccatcggggctaggggaaccccggcgcagacctggggtggggtcggaaaagctgtttcatcgcccgctcccgggccctccgctccctccctccctccctctctccctggcaggactccccgccaggcctccccgccactctccgcggcgcattccgggaggcagcggccgcagcggcctcgccatgtcccagcccggccagaagcccgccgcctccccgcggccccggcgagcagccgccgcccgccgcacccatgagcatgtcagtgaaaaaaccagtgaatcgccttccaaaccaggagaaaagaaaggatcagatgagaaaaaagcagcaagcctcggcagcagtcaatcctccagaacctatgctggtggaacagcctcggccaccaaggtgtcagcttcctctggtgcaaccagcaagtcttccagtatgaatcccacagaaaccaaggccattccagtcagccaacagatggaaggaccacatcttcctaacaagaaaaaacacaaaaaacaggctgtaaaaacagaacctgagaagaagtcacagtcaaccaagctgtctgtggttcatgagaaaaaatcccaagaaggaaagccaaaagaacacacagagccaaaaagcctacccaagcaggcatcagatacaggaagtaacgatgctcacaataaaaaagcagtttccagatcagctgaacagcagccatcagagaaatcaacagaaccaaagactaaaccacaagacatgatttctgctggtggagagagtgttgctggtatcactgcaatatctggcaagccgggtgacaagaaaaaagaaaagaaatcattaaccccagctgtgccagttgaatctaaaccggataaaccatcgggaaagtcaggcatggatgctgctttggatgacttaatagatactttaggaggacctgaagaaactgaagaagaaaatacaacgtatactggaccagaagtttcagatccaatgagttccacctacatagaggaattgggtaaaagagaagtcacaattcctccaaaatatagggaactattggctaaaaaggaagggatcacagggcctcctgcagactcttcgaaacccatagggccagatgatgctatagacgccttgtcatctgacttcacctgtgggtcgcctacagctgctggaaagaaaactgaaaaagaggaatctacagaagttttaaaagctcagtcagcagggacagtcagaagtgctgctccaccccaagagaagaaaagaaaggtggagaaggatacaatgagtgatcaagcactcgaggctctgtcggcttcactgggcacccggcaagcagaacctgagctcgacctccgctcaattaaggaagtcgatgaggcaaaagctaaagaagaaaaactagagaagtgtggtgaggatgatgaaacaatcccatctgagtacagattaaaaccagccacggataaagatggaaaaccactattgccagagcctgaagaaaaacccaagcctcggagtgaatcagaactcattgatgaactttcagaagattttgaccggtctgaatgtaaagagaaaccatctaagccaactgaaaagacagaagaatctaaggccgctgctccagctcctgtgtcggaggctgtgtgtcggacctccatgtgtagtatacagtcagcaccccctgagccggctaccttgaagggcacagtgccagatgatgctgtagaagccttggctgatagcctggggaaaaaggaagcagatccagaagatggaaaacctgtgatggataaagtcaaggagaaggccaaagaagaagaccgtgaaaagcttggtgaaaaagaagaaacaattcctcctgattatagattagaagaggtcaaggataaagatggaaagccactcctgccaaaagagtctaaggaacagcttccacccatgagtgaagacttccttctggatgctttgtctgaggacttctctggtccacaaaatgcttcatctcttaaatttgaagatgctaaacttgctgctgccatctctgaagtggtttcccaaaccccagcttcaacgacccaagctggagccccaccccgtgatacctcgcagagtgacaaagacctcgatgatgccttggataaactctctgacagtctaggacaaaggcagcctgacccagatgagaacaaaccaatggaagataaagtaaaggaaaaagctaaagctgaacatagagacaagcttggagaaagagatgacactatcccacctgaatacagacatctcctggatgataatggacaggacaaaccagtgaagccacctacaaagaaatcagaggattcaaagaaacctgcagatgaccaagaccccattgatgctctctcaggagatctggacagctgtccctccactacagaaacctcacagaacacagcaaaggataagtgcaagaaggctgcttccagctccaaagcacctaagaatggaggtaaagcgaaggattcagcaaagacaacagaggaaacttccaagccaaaagatgactaaagaaatacaagttaaggtatctggtatctgcatgtaaaatcttcagctggtggatggtgacttttgaagaacaaaaggctttggcaacagaaaacaattgttctgggtgatttctagaatggtttttgttgagtctctgaacatcctaaatattggtttgttattcttttccagaaagaaaatgaatttgactggttcacctgtgtactgagtattgataaactttgaatttttttaattgccttcaattgggagagaaagctttatatttgtgtgaggacttctgcatcttacagtcagcacagaacacactgagacttgaatcaagtcagcaacagagcaaaataaaggttagataagtccttgtgtagcaaatttcgagcataagaaataaaatctaattaattcttagggtactcatctgacttgaactctgttggtttactgtgttagtaaactgtgctttctattatctatacataaaacctgagcagcaactgtgtctttagagctattgccacattagcctttgcactgtatagcgtctggctttatggaacttaagtttaccaaatataaaaagaaacttctgcttttaaaaaaattatatatatatattaaatttgaaacctgcatttctcccacagcaatgtaagaagtaggctctgatgtcctaccactttgaatggttttctaatatcttaatgaatagttcctgaacattgcactgatatcatcgattagaattttgatatttaatttcatctttatttcctggtagagaatgcacgacaagatgtcaggtacataacataaaacagattgggaatttattgtttccaaagggcatgcccttccttagca

SEQ ID NO: 74 - protein, 791 aa, Homo sapiens
MSQPGQKPAASPRPRRAAAARRTHEHVSEKTSESPSKPGEKKGSDEKKAASLGSSQSSRTYAGGTASATKVSASSGATSKSSSMNPTETKAIPVSQQMEGPHLPNKKKHKKQAVKTEPEKKSQSTKLSVVHEKKSQEGKPKEHTEPKSLPKQASDTGSNDAHNKKAVSRSAEQQPSEKSTEPKTKPQDMISAGGESVAGITAISGKPGDKKKEKKSLTPAVPVESKPDKPSGKSGMDAALDDLIDTLGGPEETEEENTTYTGPEVSDPMSSTYIEELGKREVTIPPKYRELLAKKEGITGPPADSSKPIGPDDAIDALSSDFTCGSPTAAGKKTEKEESTEVLKAQSAGTVRSAAPPQEKKRKVEKDTMSDQALEALSASLGTRQAEPELDLRSIKEVDEAKAKEEKLEKCGEDDETIPSEYRLKPATDKDGKPLLPEPEEKPKPRSESELIDELSEDFDRSECKEKPSKPTEKTEESKAAAPAPVSEAVCRTSMCSIQSAPPEPATLKGTVPDDAVEALADSLGKKEADPEDGKPVMDKVKEKAKEEDREKLGEKEETIPPDYRLEEVKDKDGKPLLPKESKEQLPPMSEDFLLDALSEDFSGPQNASSLKFEDAKLAAAISEVVSQTPASTTQAGAPPRDTSQSDKDLDDALDKLSDSLGQRQPDPDENKPMEDKVKEKAKAEHRDKLGERDDTIPPEYRHLLDDNGQDKPVKPPTKKSEDSKKPADDQDPIDALSGDLDSCPSTTETSQNTAKDKCKKAASSSKAPKNGGKAKDSAKTTEETSKPKDD

SEQ ID NO: 75 - DNA, 3598 bp, Homo sapiens
  CDS (425)..(2734)
tgttgggaggagggtcgaagcgtatactggccacgcccgggtcccgctctctcgttgcacaactgcaagctagatctgggcatcgaaggaggaacgctgcaacctccaaccccttctttctgaccaaccgggaccagagcagtgctggggccggggcgggtcaccgggtgaggaccggggcggagggtgttaagttacagggcaggagcccgggtccctccgcgggcaggaaggggagggcccatcggggctaggggaaccccggcgcagacctggggtggggtcggaaaagctgtttcatcgcccgctcccgggccctccgctccctccctccctccctctctccctggcaggactccccgccaggcctccccgccactctccgcggcgcattccgggaggcagcggccgcagcggcctcgccatgtcccagcccggccagaagcccgccgcctccccgcggccccggcgagcagccgccgcccgccgcacccatgagcatgtcagtgaaaaaaccagtgaatcgccttccaaaccaggagaaaagaaaggatcagatgagaaaaaagcagcaagcctcggcagcagtcaatcctccagaacctatgctggtggaacagcctcggccaccaaggtgtcagcttcctctggtgcaaccagcaagtcttccagtatgaatcccacagaaaccaaggctgtaaaaacagaacctgagaagaagtcacagtcaaccaagctgtctgtggttcatgagaaaaaatcccaagaaggaaagccaaaagaacacacagagccaaaaagcctacccaagcaggcatcagatacaggaagtaacgatgctcacaataaaaaagcagtttccagatcagctgaacagcagccatcagagaaatcaacagaaccaaagactaaaccacaagacatgatttctgctggtggagagagtgttgctggtatcactgcaatatctggcaagccgggtgacaagaaaaaagaaaagaaatcattaaccccagctgtgccagttgaatctaaaccggataaaccatcgggaaagtcaggcatggatgctgctttggatgacttaatagatactttaggaggacctgaagaaactgaagaagaaaatacaacgtatactggaccagaagtttcagatccaatgagttccacctacatagaggaattgggtaaaagagaagtcacaattcctccaaaatatagggaactattggctaaaaaggaagggatcacagggcctcctgcagactcttcgaaacccatagggccagatgatgctatagacgccttgtcatctgacttcacctgtgggtcgcctacagctgctggaaagaaaactgaaaaagaggaatctacagaagttttaaaagctcagtcagcagggacagtcagaagtgctgctccaccccaagagaagaaaagaaaggtggagaaggatacaatgagtgatcaagcactcgaggctctgtcggcttcactgggcacccggcaagcagaacctgagctcgacctccgctcaattaaggaagtcgatgaggcaaaagctaaagaagaaaaactagagaagtgtggtgaggatgatgaaacaatcccatctgagtacagattaaaaccagccacggataaagatggaaaaccactattgccagagcctgaagaaaaacccaagcctcggagtgaatcagaactcattgatgaactttcagaagattttgaccggtctgaatgtaaagagaaaccatctaagccaactgaaaagacagaagaatctaaggccgctgctccagctcctgtgtcggaggctgtgtgtcggacctccatgtgtagtatacagtcagcaccccctgagccggctaccttgaagggcacagtgccagatgatgctgtagaagccttggctgatagcctggggaaaaaggaagcagatccagaagatggaaaacctgtgatggataaagtcaaggagaaggccaaagaagaagaccgtgaaaagcttggtgaaaaagaagaaacaattcctcctgattatagattagaagaggtcaaggataaagatggaaagccactcctgccaaaagagtctaaggaacagcttccacccatgagtgaagacttccttctggatgctttgtctgaggacttctctggtccacaaaatgcttcatctcttaaatttgaagatgctaaacttgctgctgccatctctgaagtggtttcccaaaccccagcttcaacgacccaagctggagccccaccccgtgatacctcgcagagtgacaaagacctcgatgatgccttggataaactctctgacagtctaggacaaaggcagcctgacccagatgagaacaaaccaatggaagataaagtaaaggaaaaagctaaagctgaacatagagacaagcttggagaaagagatgacactatcccacctgaatacagacatctcctggatgataatggacaggacaaaccagtgaagccacctacaaagaaatcagaggattcaaagaaacctgcagatgaccaagaccccattgatgctctctcaggagatctggacagctgtccctccactacagaaacctcacagaacacagcaaaggataagtgcaagaaggctgcttccagctccaaagcacctaagaatggaggtaaagcgaaggattcagcaaagacaacagaggaaacttccaagccaaaagatgactaaagaaatacaagttaaggtatctggtatctgcatgtaaaatcttcagctggtggatggtgacttttgaagaacaaaaggctttggcaacagaaaacaattgttctgggtgatttctagaatggtttttgttgagtctctgaacatcctaaatattggtttgttattcttttccagaaagaaaatgaatttgactggttcacctgtgtactgagtattgataaactttgaatttttttaattgccttcaattgggagagaaagctttatatttgtgtgaggacttctgcatcttacagtcagcacagaacacactgagacttgaatcaagtcagcaacagagcaaaataaaggttagataagtccttgtgtagcaaatttcgagcataagaaataaaatctaattaattcttagggtactcatctgacttgaactctgttggtttactgtgttagtaaactgtgctttctattatctatacataaaacctgagcagcaactgtgtctttagagctattgccacattagcctttgcactgtatagcgtctggctttatggaacttaagtttaccaaatataaaaagaaacttctgcttttaaaaaaattatatatatatattaaatttgaaacctgcatttctcccacagcaatgtaagaagtaggctctgatgtcctaccactttgaatggttttctaatatcttaatgaatagttcctgaacattgcactgatatcatcgattagaattttgatatttaatttcatctttatttcctggtagagaatgcacgacaagatgtcaggtacataacataaaacagattgggaatttattgtttccaaagggcatgcccttccttagca

SEQ ID NO: 76 - protein, 769 aa, Homo sapiens
MSQPGQKPAASPRPRRAAAARRTHEHVSEKTSESPSKPGEKKGSDEKKAASLGSSQSSRTYAGGTASATKVSASSGATSKSSSMNPTETKAVKTEPEKKSQSTKLSVVHEKKSQEGKPKEHTEPKSLPKQASDTGSNDAHNKKAVSRSAEQQPSEKSTEPKTKPQDMISAGGESVAGITAISGKPGDKKKEKKSLTPAVPVESKPDKPSGKSGMDAALDDLIDTLGGPEETEEENTTYTGPEVSDPMSSTYIEELGKREVTIPPKYRELLAKKEGITGPPADSSKPIGPDDAIDALSSDFTCGSPTAAGKKTEKEESTEVLKAQSAGTVRSAAPPQEKKRKVEKDTMSDQALEALSASLGTRQAEPELDLRSIKEVDEAKAKEEKLEKCGEDDETIPSEYRLKPATDKDGKPLLPEPEEKPKPRSESELIDELSEDFDRSECKEKPSKPTEKTEESKAAAPAPVSEAVCRTSMCSIQSAPPEPATLKGTVPDDAVEALADSLGKKEADPEDGKPVMDKVKEKAKEEDREKLGEKEETIPPDYRLEEVKDKDGKPLLPKESKEQLPPMSEDFLLDALSEDFSGPQNASSLKFEDAKLAAAISEVVSQTPASTTQAGAPPRDTSQSDKDLDDALDKLSDSLGQRQPDPDENKPMEDKVKEKAKAEHRDKLGERDDTIPPEYRHLLDDNGQDKPVKPPTKKSEDSKKPADDQDPIDALSGDLDSCPSTTETSQNTAKDKCKKAASSSKAPKNGGKAKDSAKTTEETSKPKDD

SEQ ID NO: 77 - DNA, 3541 bp, Homo sapiens
  CDS (425)..(2677)
tgttgggaggagggtcgaagcgtatactggccacgcccgggtcccgctctctcgttgcacaactgcaagctagatctgggcatcgaaggaggaacgctgcaacctccaaccccttctttctgaccaaccgggaccagagcagtgctggggccggggcgggtcaccgggtgaggaccggggcggagggtgttaagttacagggcaggagcccgggtccctccgcgggcaggaaggggagggcccatcggggctaggggaaccccggcgcagacctggggtggggtcggaaaagctgtttcatcgcccgctcccgggccctccgctccctccctccctccctctctccctggcaggactccccgccaggcctccccgccactctccgcggcgcattccgggaggcagcggccgcagcggcctcgccatgtcccagcccggccagaagcccgccgcctccccgcggccccggcgagcagccgccgcccgccgcacccatgagcatgtcagtgaaaaaaccagtgaatcgccttccaaaccaggagaaaagaaaggatcagatgagaaaaaagcagcaagcctcggcagcagtcaatcctccagaacctatgctggtggaacagcctcggccaccaaggtgtcagcttcctctggtgcaaccagcaagtcttccagtatgaatcccacagaaaccaaggctgtaaaaacagaacctgagaagaagtcacagtcaaccaagccaaaaagcctacccaagcaggcatcagatacaggaagtaacgatgctcacaataaaaaagcagtttccagatcagctgaacagcagccatcagagaaatcaacagaaccaaagactaaaccacaagacatgatttctgctggtggagagagtgttgctggtatcactgcaatatctggcaagccgggtgacaagaaaaaagaaaagaaatcattaaccccagctgtgccagttgaatctaaaccggataaaccatcgggaaagtcaggcatggatgctgctttggatgacttaatagatactttaggaggacctgaagaaactgaagaagaaaatacaacgtatactggaccagaagtttcagatccaatgagttccacctacatagaggaattgggtaaaagagaagtcacaattcctccaaaatatagggaactattggctaaaaaggaagggatcacagggcctcctgcagactcttcgaaacccatagggccagatgatgctatagacgccttgtcatctgacttcacctgtgggtcgcctacagctgctggaaagaaaactgaaaaagaggaatctacagaagttttaaaagctcagtcagcagggacagtcagaagtgctgctccaccccaagagaagaaaagaaaggtggagaaggatacaatgagtgatcaagcactcgaggctctgtcggcttcactgggcacccggcaagcagaacctgagctcgacctccgctcaattaaggaagtcgatgaggcaaaagctaaagaagaaaaactagagaagtgtggtgaggatgatgaaacaatcccatctgagtacagattaaaaccagccacggataaagatggaaaaccactattgccagagcctgaagaaaaacccaagcctcggagtgaatcagaactcattgatgaactttcagaagattttgaccggtctgaatgtaaagagaaaccatctaagccaactgaaaagacagaagaatctaaggccgctgctccagctcctgtgtcggaggctgtgtgtcggacctccatgtgtagtatacagtcagcaccccctgagccggctaccttgaagggcacagtgccagatgatgctgtagaagccttggctgatagcctggggaaaaaggaagcagatccagaagatggaaaacctgtgatggataaagtcaaggagaaggccaaagaagaagaccgtgaaaagcttggtgaaaaagaagaaacaattcctcctgattatagattagaagaggtcaaggataaagatggaaagccactcctgccaaaagagtctaaggaacagcttccacccatgagtgaagacttccttctggatgctttgtctgaggacttctctggtccacaaaatgcttcatctcttaaatttgaagatgctaaacttgctgctgccatctctgaagtggtttcccaaaccccagcttcaacgacccaagctggagccccaccccgtgatacctcgcagagtgacaaagacctcgatgatgccttggataaactctctgacagtctaggacaaaggcagcctgacccagatgagaacaaaccaatggaagataaagtaaaggaaaaagctaaagctgaacatagagacaagcttggagaaagagatgacactatcccacctgaatacagacatctcctggatgataatggacaggacaaaccagtgaagccacctacaaagaaatcagaggattcaaagaaacctgcagatgaccaagaccccattgatgctctctcaggagatctggacagctgtccctccactacagaaacctcacagaacacagcaaaggataagtgcaagaaggctgcttccagctccaaagcacctaagaatggaggtaaagcgaaggattcagcaaagacaacagaggaaacttccaagccaaaagatgactaaagaaatacaagttaaggtatctggtatctgcatgtaaaatcttcagctggtggatggtgacttttgaagaacaaaaggctttggcaacagaaaacaattgttctgggtgatttctagaatggtttttgttgagtctctgaacatcctaaatattggtttgttattcttttccagaaagaaaatgaatttgactggttcacctgtgtactgagtattgataaactttgaatttttttaattgccttcaattgggagagaaagctttatatttgtgtgaggacttctgcatcttacagtcagcacagaacacactgagacttgaatcaagtcagcaacagagcaaaataaaggttagataagtccttgtgtagcaaatttcgagcataagaaataaaatctaattaattcttagggtactcatctgacttgaactctgttggtttactgtgttagtaaactgtgctttctattatctatacataaaacctgagcagcaactgtgtctttagagctattgccacattagcctttgcactgtatagcgtctggctttatggaacttaagtttaccaaatataaaaagaaacttctgcttttaaaaaaattatatatatatattaaatttgaaacctgcatttctcccacagcaatgtaagaagtaggctctgatgtcctaccactttgaatggttttctaatatcttaatgaatagttcctgaacattgcactgatatcatcgattagaattttgatatttaatttcatctttatttcctggtagagaatgcacgacaagatgtcaggtacataacataaaacagattgggaatttattgtttccaaagggcatgcccttccttagca

SEQ ID NO: 78 - protein, 750 aa, Homo sapiens
MSQPGQKPAASPRPRRAAAARRTHEHVSEKTSESPSKPGEKKGSDEKKAASLGSSQSSRTYAGGTASATKVSASSGATSKSSSMNPTETKAVKTEPEKKSQSTKPKSLPKQASDTGSNDAHNKKAVSRSAEQQPSEKSTEPKTKPQDMISAGGESVAGITAISGKPGDKKKEKKSLTPAVPVESKPDKPSGKSGMDAALDDLIDTLGGPEETEEENTTYTGPEVSDPMSSTYIEELGKREVTIPPKYRELLAKKEGITGPPADSSKPIGPDDAIDALSSDFTCGSPTAAGKKTEKEESTEVLKAQSAGTVRSAAPPQEKKRKVEKDTMSDQALEALSASLGTRQAEPELDLRSIKEVDEAKAKEEKLEKCGEDDETIPSEYRLKPATDKDGKPLLPEPEEKPKPRSESELIDELSEDFDRSECKEKPSKPTEKTEESKAAAPAPVSEAVCRTSMCSIQSAPPEPATLKGTVPDDAVEALADSLGKKEADPEDGKPVMDKVKEKAKEEDREKLGEKEETIPPDYRLEEVKDKDGKPLLPKESKEQLPPMSEDFLLDALSEDFSGPQNASSLKFEDAKLAAAISEVVSQTPASTTQAGAPPRDTSQSDKDLDDALDKLSDSLGQRQPDPDENKPMEDKVKEKAKAEHRDKLGERDDTIPPEYRHLLDDNGQDKPVKPPTKKSEDSKKPADDQDPIDALSGDLDSCPSTTETSQNTAKDKCKKAASSSKAPKNGGKAKDSAKTTEETSKPKDD

SEQ ID NO: 79 - DNA, 9058 bp, Homo sapiens
  CDS (44)..(7699)
agtgtaatttgagaccggtggtaaggattggagcgagctagagatgctgcacgctgctaacaagggaaggaagccttcagctgaggcaggtcgtcccattccacctacatcctcgcctagtctcctcccatctgctcagctgcctagctcccataatcctccaccagttagctgccagatgccattgctagacagcaacacctcccatcaaatcatggacaccaaccctgatgaggaattctcccccaattcatacctgctcagagcatgctcagggccccagcaagcctccagcagtggccctccgaaccaccacagccagtcgactctgaggccccctctcccaccccctcacaaccacacgctgtcccatcaccactcgtccgccaactccctcaacaggaactcactgaccaatcggcggagtcagatccacgccccggccccagcgcccaatgacctggccaccacaccagagtccgttcagcttcaggacagctgggtgctaaacagcaacgtgccactggagacccggcacttcctcttcaagacctcctcggggagcacacccttgttcagcagctcttccccgggataccctttgacctcaggaacggtttacacgcccccgccccgcctgctgcccaggaatactttctccaggaaggctttcaagctgaagaagccctccaaatactgcagctggaaatgtgctgccctctccgccattgccgcggccctcctcttggctattttgctggcgtatttcatagcaatgcatctgctcggactcaattggcaactccagcctgcagatgggcacacctttaacaatgggataaggaccggcttaccaggaaacgatgatgtggcaacaatgccatctggaggcaaagtgccctggtcgttgaaaaacagcagcatagacagtggtgaagcagaagttggtcggcgggtaacacaagaagtcccaccaggggtgttttggaggtcacaaattcacatcagtcagccccagttcttaaagttcaacatctccctcgggaaggacgctctctttggtgtttacataagaagaggacttccaccatctcatgcccagtatgacttcatggaacgtctggacgggaaggagaagtggagtgtggttgagtctcccagggaacgccggagcatacagaccttggttcagaatgaagccgtgtttgtgcagtacctggatgtgggcctgtggcatctggccttctacaatgatggaaaagacaaagagatggtttccttcaatactgttgtcctagattcagtgcaggactgtccacgtaactgccatgggaatggtgaatgtgtgtccggggtgtgtcactgtttcccaggatttctaggagcagactgtgctaaagctgcctgccctgtcctgtgcagtgggaatggacaatattctaaagggacgtgccagtgctacagcggctggaaaggtgcagagtgcgacgtgcccatgaatcagtgcatcgatccttcctgcgggggccacggctcctgcattgatgggaactgtgtctgctctgctggctacaaaggcgagcactgtgaggaagttgattgcttggatcccacctgctccagccacggagtctgtgtgaatggagaatgcctgtgcagccctggctggggtggtctgaactgtgagctggcgagggtccagtgcccagaccagtgcagtgggcatggcacgtacctgcctgacacgggcctctgcagctgcgatcccaactggatgggtcccgactgctctgttgatggctgccctgacttgtgcaacggtaacgggagatgcacactgggtcagaacagctggcagtgtgtctgccagaccggctggagagggcccggatgcaacgttgccatggaaacttcctgtgctgataacaaggataatgagggagatggcctggtggattgtttggaccctgactgctgcctgcagtcagcctgtcagaacagcctgctctgccgggggtcccgggacccactggacatcattcagcagggccagacggattggcccgcagtgaagtccttctatgaccgtatcaagctcttggcaggcaaggatagcacccacatcattcctggagagaaccctttcaacagcagcttggtttctctcatccgaggccaagtagtaactacagatggaactcccctggtcggtgtgaacgtgtcttttgtcaagtacccaaaatacggctacaccatcacccgccaggatggcacgttcgacctgatcgcaaatggaggtgcttccttgactctacactttgagcgagccccgttcatgagccaggagcgcactgtgtggctgccgtggaacagcttttacgccatggacaccctggtgatgaagaccgaggagaactccatccccagctgtgacctcagtggctttgtccggcctgatccaatcatcatctcctccccactgtccaccttctttagtgctgcccctgggcagaatcccatcgtgcctgagacccaggttcttcatgaagaaatcgagctccctggttccaatgtgaaacttcgctatctgagctctagaactgcagggtacaagtcactgctgaagatcaccatgacccagtccacagtgcccctgaacctcattagggttcacctgatggtggctgtcgaggggcatctcttccagaagtcattccaggcttctcccaacctggcctacaccttcatctgggacaagacagatgcgtatggccaaagggtgtatggactctcagatgctgttgtgtctgtcgggtttgaatatgagacctgtcccagtctaattctctgggagaaaaggacagccctccttcagggattcgagctggacccctccaacctcggtggctggtccctagacaaacaccacatcctcaatgttaaaagtggaatcctacacaaaggcactggggaaaaccagttcctgacccagcagcctgccatcatcaccagcatcatgggcaatggtcgccgccggagcatttcctgtcccagctgcaacggccttgctgaaggcaacaagctgctggccccagtggctctggctgttggaatcgatgggagcctctatgtgggtgacttcaattacatccgacgcatctttccctctcgaaatgtgaccagcatcttggagttacgaaataaagagtttaaacatagcaacaacccagcacacaagtactacttggcagtggaccccgtgtccggctcgctctacgtgtccgacaccaacagcaggagaatctaccgcgtcaagtctctgagtggaaccaaagacctggctgggaattcggaagttgtggcagggacgggagagcagtgtctaccctttgatgaagcccgctgcggggatggagggaaggccatagatgcaaccctgatgagcccgagaggtattgcagtagacaagaatgggctcatgtactttgtcgatgccaccatgatccggaaggttgaccagaatggaatcatctccaccctgctgggctccaatgacctcactgccgtccggccgctgagctgtgattccagcatggatgtagcccaggttcgtctggagtggccaacagaccttgctgtcaatcccatggataactccttgtatgttctagagaacaatgtcatccttcgaatcaccgagaaccaccaagtcagcatcattgcgggacgccccatgcactgccaagttcctggcattgactactcactcagcaaactagccattcactctgccctggagtcagccagtgccattgccatttctcacactggggtcctctacatcactgagacagatgagaagaagattaaccgtctacgccaggtaacaaccaacggggagatctgccttttagctggggcagcctcggactgcgactgcaaaaacgatgtcaattgcaactgctattcaggagatgatgcctacgcgactgatgccatcttgaattccccatcatccttagctgtagctccagatggtaccatttacattgcagaccttggaaatattcggatcagggcggtcagcaagaacaagcctgttcttaatgccttcaaccagtatgaggctgcatcccccggagagcaggagttatatgttttcaacgctgatggcatccaccaatacactgtgagcctggtgacaggggagtacttgtacaatttcacatatagtactgacaatgatgtcactgaattgattgacaataatgggaattccctgaagatccgtcgggacagcagtggcatgccccgtcacctgctcatgcctgacaaccagatcatcaccctcaccgtgggcaccaatggaggcctcaaagtcgtgtccacacagaacctggagcttggtctcatgacctatgatggcaacactgggctcctggccaccaagagcgatgaaacaggatggacgactttctatgactatgaccacgaaggccgcctgaccaacgtgacgcgccccacgggggtggtaaccagtctgcaccgggaaatggagaaatctattaccattgacattgagaactccaaccgtgatgatgacgtcactgtcatcaccaacctctcttcagtagaggcctcctacacagtggtacaagatcaagttcggaacagctaccagctctgtaataatggtaccctgagggtgatgtatgctaatgggatgggtatcagcttccacagcgagccccatgtcctagcgggcaccatcacccccaccattggacgctgcaacatctccctgcctatggagaatggcttaaactccattgagtggcgcctaagaaaggaacagattaaaggcaaagtcaccatctttggcaggaagctccgggtccatggaagaaatctcttgtccattgactatgatcgaaatattcggactgaaaagatctatgatgaccaccggaagttcaccctgaggatcatttatgaccaggtgggccgccccttcctctggctgcccagcagcgggctggcagctgtcaacgtgtcatacttcttcaatgggcgcctggctgggcttcagcgtggggccatgagcgagaggacagacatcgacaagcaaggccgcatcgtgtcccgcatgttcgctgacgggaaagtgtggagctactcctaccttgacaagtccatggtcctcctgcttcagagccaacgtcagtatatatttgagtatgactcctctgaccgcctccttgccgtcaccatgcccagcgtggcccggcacagcatgtccacacacacctccatcggctacatccgtaatatttacaacccgcctgaaagcaatgcttcggtcatctttgactacagtgatgacggccgcatcctgaagacctcctttttgggcaccggacgccaggtgttctacaagtatgggaaactctccaagttatcagagattgtctacgacagtaccgccgtcaccttcgggtatgacgagaccactggtgtcttgaagatggtcaacctccaaagtgggggcttctcctgcaccatcaggtaccggaagattggccccctggtggacaagcagatctacaggttctccgaggaaggcatggtcaatgccaggtttgactacacctatcatgacaacagcttccgcatcgcaagcatcaagcccgtcataagtgagactcccctccccgttgacctctaccgctatgatgagatttctggcaaggtggaacactttggtaagtttggagtcatctattatgacatcaaccagatcatcaccactgccgtgatgaccctcagcaaacacttcgacacccatgggcggatcaaggaggtccagtatgagatgttccggtccctcatgtactggatgacggtgcaatatgacagcatgggcagggtgatcaagagggagctaaaactggggccctatgccaataccacgaagtacacctatgactacgatggggacgggcagctccagagcgtggccgtcaatgaccgcccgacctggcgctacagctatgaccttaatgggaatctccacttactgaacccaggcaacagtgtgcgcctcatgcccttgcgctatgacctccgggatcggataaccagactcggggatgtgcagtacaaaattgacgacgatggctatctgtgccagagagggtctgacatcttcgaatacaattccaagggcctcctaacaagagcctacaacaaggccagcgggtggagtgtccagtaccgctatgatggcgtaggacggcgggcttcctacaagaccaacctgggccaccacctgcagtacttctactctgacctccacaacccgacgcgcatcacccatgtctacaatcactccaactcggagattacctcactgtactacgacctccagggccacctctttgccatggagagcagcagtggggaggagtactatgttgcctctgataacacagggactcctctggctgtgttcagcatcaacggcctcatgatcaaacagctgcagtacacggcctatggggagatttattatgactccaaccccgacttccagatggtcattggcttccatgggggactctatgaccccctgaccaagctggtccacttcactcagcgtgattatgatgtgctggcaggacgatggacctccccagactataccatgtggaaaaacgtgggcaaggagccggccccctttaacctgtatatgttcaagagcaacaatcctctcagcagtgagctagatttgaagaactacgtgacagatgtgaaaagctggcttgtgatgtttggatttcagcttagcaacatcattcctggcttcccgagagccaaaatgtatttcgtgcctcctccctatgaattgtcagagagtcaagcaagtgagaatggacagctcattacaggtgtccaacagacaacagagagacataaccaggccttcatggctctggaaggacaggtcattactaaaaagctccacgccagcatccgagagaaagcaggtcactggtttgccaccaccacgcccatcattggcaaaggcatcatgtttgccatcaaagaagggcgggtgaccacgggcgtgtccagcatcgccagcgaagatagccgcaaggtggcatctgtgctgaacaacgcctactacctggacaagatgcactacagcatcgagggcaaggacacccactactttgtgaagattggctcagccgatggcgacctggtcacactaggcaccaccatcggccgcaaggtgctagagagcggggtgaacgtgaccgtgtcccagcccacgctgctggtcaacggcaggactcgaaggttcacgaacattgagttccagtactccacgctgctgctcagcatccgctatggcctcacccccgacaccctggacgaagagaaggcccgcgtcctggaccaggcgagacagagggccctgggcacggcctgggccaaggagcagcagaaagccagggacgggagagaggggagccgcctgtggactgagggcgagaagcagcagcttctgagcaccgggcgcgtgcaagggtacgagggatattacgtgcttcccgtggagcaatacccagagcttgcagacagtagcagcaacatccagtttttaagacagaatgagatgggaaagaggtaacaaaataatctgctgccattccttgtctgaatggctcagcaggagtaactgttatctcctctcctaaggagatgaagacctaacaggggcactgcggctgggctgctttaggagaccaagtggcaagaaagctcacattttttgagttcaaatgctactgtccaagcgagaagtccctcatcctgaagtagactaaagcccggctgaaaattccgaggaaaacaaaacaaacgaatgaatgaacagacacacacaatgttccaagttcccctaaaatatgacccacttgttctgggtctacgcagaaaagagacgcaaagtgtccaaaaggaacaaaagaacaaaaacgaataagcaaagaagaaaacaaacaaaaacaaaacaaaacaaacacacggaccgataaacaaagaagcgaagataagaaagaaggcctcatatccaattacctcactcattcacatgtgagcgacacgcagacatccgcgagggccagcgtcaccagaccagctgcgggacaaaccactcagactgcttgtaggacaaatacttctgacattttcgtttaagcaaatacaggtgcatttaaaacacgactttgggggtgatttgtgtgtagcgcctggggaggggggataaaagaggaggagtgagcactggaaatactttttaaagaaaaaaaaacatgagggaataaaagaaattcctatcaaaaatcaaagtgaaataataccatccagcacttaactctcaggtcccaactaagtctggcctgagctaatttatttgagcgcagagtgtaaaatttaattcaaaatggtggctataatcactacagataaatttcatactcttttgtctttggagattccattgtggacagtaatacgcagttacagggtgtagtctgtttagattccgtagttcgtgggtatcagtttcggtagaggtgcagcatcgtgacacttttgctaacaggtaccacttctgatcaccctgtacatacatgagccgaaaggcacaatcactgtttcagatttaaaattattagtgtgtttgtttggtccagaaactgagacaatcacatgacagtcaccacgaggagagaaaatttaaaaaataaaaataaaaacaaaaaaaattttaaaaattaaaaaaacaaaaataaagtctaataagaactttggtacaggaacttttttgtaatatacatgtatgaattgttcatcgagtttttatattaattttaatttgctgctaagcaaagactagggacaggcaaagataatttatggcaaagtgtttaaattgtttatacatgaataaagtctctaaaactccaaaaaaaaaaaaaaaaaa

SEQ ID NO: 80 - protein, 2551 aa, Homo sapiens
MLHAANKGRKPSAEAGRPIPPTSSPSLLPSAQLPSSHNPPPVSCQMPLLDSNTSHQIMDTNPDEEFSPNSYLLRACSGPQQASSSGPPNHHSQSTLRPPLPPPHNHTLSHHHSSANSLNRNSLTNRRSQIHAPAPAPNDLATTPESVQLQDSWVLNSNVPLETRHFLFKTSSGSTPLFSSSSPGYPLTSGTVYTPPPRLLPRNTFSRKAFKLKKPSKYCSWKCAALSAIAAALLLAILLAYFIAMHLLGLNWQLQPADGHTFNNGIRTGLPGNDDVATMPSGGKVPWSLKNSSIDSGEAEVGRRVTQEVPPGVFWRSQIHISQPQFLKFNISLGKDALFGVYIRRGLPPSHAQYDFMERLDGKEKWSVVESPRERRSIQTLVQNEAVFVQYLDVGLWHLAFYNDGKDKEMVSFNTVVLDSVQDCPRNCHGNGECVSGVCHCFPGFLGADCAKAACPVLCSGNGQYSKGTCQCYSGWKGAECDVPMNQCIDPSCGGHGSCIDGNCVCSAGYKGEHCEEVDCLDPTCSSHGVCVNGECLCSPGWGGLNCELARVQCPDQCSGHGTYLPDTGLCSCDPNWMGPDCSVDGCPDLCNGNGRCTLGQNSWQCVCQTGWRGPGCNVAMETSCADNKDNEGDGLVDCLDPDCCLQSACQNSLLCRGSRDPLDIIQQGQTDWPAVKSFYDRIKLLAGKDSTHIIPGENPFNSSLVSLIRGQVVTTDGTPLVGVNVSFVKYPKYGYTITRQDGTFDLIANGGASLTLHFERAPFMSQERTVWLPWNSFYAMDTLVMKTEENSIPSCDLSGFVRPDPIIISSPLSTFFSAAPGQNPIVPETQVLHEEIELPGSNVKLRYLSSRTAGYKSLLKITMTQSTVPLNLIRVHLMVAVEGHLFQKSFQASPNLAYTFIWDKTDAYGQRVYGLSDAVVSVGFEYETCPSLILWEKRTALLQGFELDPSNLGGWSLDKHHILNVKSGILHKGTGENQFLTQQPAIITSIMGNGRRRSISCPSCNGLAEGNKLLAPVALAVGIDGSLYVGDFNYIRRIFPSRNVTSILELRNKEFKHSNNPAHKYYLAVDPVSGSLYVSDTNSRRIYRVKSLSGTKDLAGNSEVVAGTGEQCLPFDEARCGDGGKAIDATLMSPRGIAVDKNGLMYFVDATMIRKVDQNGIISTLLGSNDLTAVRPLSCDSSMDVAQVRLEWPTDLAVNPMDNSLYVLENNVILRITENHQVSIIAGRPMHCQVPGIDYSLSKLAIHSALESASAIAISHTGVLYITETDEKKINRLRQVTTNGEICLLAGAASDCDCKNDVNCNCYSGDDAYATDAILNSPSSLAVAPDGTIYIADLGNIRIRAVSKNKPVLNAFNQYEAASPGEQELYVFNADGIHQYTVSLVTGEYLYNFTYSTDNDVTELIDNNGNSLKIRRDSSGMPRHLLMPDNQIITLTVGTNGGLKVVSTQNLELGLMTYDGNTGLLATKSDETGWTTFYDYDHEGRLTNVTRPTGVVTSLHREMEKSITIDIENSNRDDDVTVITNLSSVEASYTVVQDQVRNSYQLCNNGTLRVMYANGMGISFHSEPHVLAGTITPTIGRCNISLPMENGLNSIEWRLRKEQIKGKVTIFGRKLRVHGRNLLSIDYDRNIRTEKIYDDHRKFTLRIIYDQVGRPFLWLPSSGLAAVNVSYFFNGRLAGLQRGAMSERTDIDKQGRIVSRMFADGKVWSYSYLDKSMVLLLQSQRQYIFEYDSSDRLLAVTMPSVARHSMSTHTSIGYIRNIYNPPESNASVIFDYSDDGRILKTSFLGTGRQVFYKYGKLSKLSEIVYDSTAVTFGYDETTGVLKMVNLQSGGFSCTIRYRKIGPLVDKQIYRFSEEGMVNARFDYTYHDNSFRIASIKPVISETPLPVDLYRYDEISGKVEHFGKFGVIYYDINQIITTAVMTLSKHFDTHGRIKEVQYEMFRSLMYWMTVQYDSMGRVIKRELKLGPYANTTKYTYDYDGDGQLQSVAVNDRPTWRYSYDLNGNLHLLNPGNSVRLMPLRYDLRDRITRLGDVQYKIDDDGYLCQRGSDIFEYNSKGLLTRAYNKASGWSVQYRYDGVGRRASYKTNLGHHLQYFYSDLHNPTRITHVYNHSNSEITSLYYDLQGHLFAMESSSGEEYYVASDNTGTPLAVFSINGLMIKQLQYTAYGEIYYDSNPDFQMVIGFHGGLYDPLTKLVHFTQRDYDVLAGRWTSPDYTMWKNVGKEPAPFNLYMFKSNNPLSSELDLKNYVTDVKSWLVMFGFQLSNIIPGFPRAKMYFVPPPYELSESQASENGQLITGVQQTTERHNQAFMALEGQVITKKLHASIREKAGHWFATTTPIIGKGIMFAIKEGRVTTGVSSIASEDSRKVASVLNNAYYLDKMHYSIEGKDTHYFVKIGSADGDLVTLGTTIGRKVLESGVNVTVSQPTLLVNGRTRRFTNIEFQYSTLLLSIRYGLTPDTLDEEKARVLDQARQRALGTAWAKEQQKARDGREGSRLWTEGEKQQLLSTGRVQGYEGYYVLPVEQYPELADSSSNIQFLRQNEMGKR

SEQ ID NO: 81 - DNA, 9695 bp, Homo sapiens
  CDS (435)..(8336)
gtaaccgtcagaattttgtaataacgactcactatagggcggccgcgaattcggcacgagtcgaagtgaaggaattttgctccaaagcgagctgggaccgaagactctaggctaagttatctatgtagatggtgtcagggagcgaagctactgaccgagctgctgacactggagacagaacagtgagcaacagagacaaatcctctcttctcctacagtttgcatcgcagtaagaaagaactaagttacatccagctttttaattgcctaagcggtctggggcttgcttcgtcatttggctttgctgtggagcactcctgtaaagccagctgaattgtacatcgaagatccacccttttggtggcaaagtgacaagtgccaaaactcaggcctgacttttctgaaaacatcagcattctgccatatctggaataatggatgtaaaggaccggcgacaccgctctttgaccagaggacgctgtggcaaagagtgtcgctacacaagctcctctctggacagtgaggactgccgcgtgcccacacagaaatcctacagctccagtgagactctgaaggcctatgaccatgacagcaggatgcactatggaaaccgagtcacagacctcatccaccgggagtcagatgagtttcctagacaaggaaccaacttcacccttgccgaactgggcatctgtgagccctccccacaccgaagcggctactgctccgacatggggatccttcaccagggctactcccttagcacagggtctgacgccgactccgacaccgagggagggatgtctccagaacacgccatcagactgtggggcagagggataaaatccaggcgcagttccggcctgtccagtcgtgaaaactcggcccttaccctgactgactctgacaacgaaaacaaatcagatgatgagaacggccctccgaaccaccacagccagtcgactctgaggccccctctcccaccccctcacaaccacacgctgtcccatcaccactcgtccgccaactccctcaacaggaactcactgaccaatcggcggagtcagatccacgccccggccccagcgcccaatgacctggccaccacaccagagtccgttcagcttcaggacagctgggtgctaaacagcaacgtgccactggagacccggcacttcctcttcaagacctcctcggggagcacacccttgttcagcagctcttccccgggataccctttgacctcaggaacggtttacacgcccccgccccgcctgctgcccaggaatactttctccaggaaggctttcaagctgaagaagccctccaaatactgcagctggaaatgtgctgccctctccgccattgccgcggccctcctcttggctattttgctggcgtatttcatagcaatgcatctgctcggactcaattggcaactccagcctgcagatgggcacacctttaacaatgggataaggaccggcttaccaggaaacgatgatgtggcaacaatgccatctggaggcaaagtgccctggtcgttgaaaaacagcagcatagacagtggtgaagcagaagttggtcggcgggtaacacaagaagtcccaccaggggtgttttggaggtcacaaattcacatcagtcagccccagttcttaaagttcaacatctccctcgggaaggacgctctctttggtgtttacataagaagaggacttccaccatctcatgcccagtatgacttcatggaacgtctggacgggaaggagaagtggagtgtggttgagtctcccagggaacgccggagcatacagaccttggttcagaatgaagccgtgtttgtgcagtacctggatgtgggcctgtggcatctggccttctacaatgatggaaaagacaaagagatggtttccttcaatactgttgtcctagattcagtgcaggactgtccacgtaactgccatgggaatggtgaatgtgtgtccggggtgtgtcactgtttcccaggatttctaggagcagactgtgctaaagctgcctgccctgtcctgtgcagtgggaatggacaatattctaaagggacgtgccagtgctacagcggctggaaaggtgcagagtgcgacgtgcccatgaatcagtgcatcgatccttcctgcgggggccacggctcctgcattgatgggaactgtgtctgctctgctggctacaaaggcgagcactgtgaggaagttgattgcttggatcccacctgctccagccacggagtctgtgtgaatggagaatgcctgtgcagccctggctggggtggtctgaactgtgagctggcgagggtccagtgcccagaccagtgcagtgggcatggcacgtacctgcctgacacgggcctctgcagctgcgatcccaactggatgggtcccgactgctctgttgatggctgccctgacttgtgcaacggtaacgggagatgcacactgggtcagaacagctggcagtgtgtctgccagaccggctggagagggcccggatgcaacgttgccatggaaacttcctgtgctgataacaaggataatgagggagatggcctggtggattgtttggaccctgactgctgcctgcagtcagcctgtcagaacagcctgctctgccgggggtcccgggacccactggacatcattcagcagggccagacggattggcccgcagtgaagtccttctatgaccgtatcaagctcttggcaggcaaggatagcacccacatcattcctggagagaaccctttcaacagcagcttggtttctctcatccgaggccaagtagtaactacagatggaactcccctggtcggtgtgaacgtgtcttttgtcaagtacccaaaatacggctacaccatcacccgccaggatggcacgttcgacctgatcgcaaatggaggtgcttccttgactctacactttgagcgagccccgttcatgagccaggagcgcactgtgtggctgccgtggaacagcttttacgccatggacaccctggtgatgaagaccgaggagaactccatccccagctgtgacctcagtggctttgtccggcctgatccaatcatcatctcctccccactgtccaccttctttagtgctgcccctgggcagaatcccatcgtgcctgagacccaggttcttcatgaagaaatcgagctccctggttccaatgtgaaacttcgctatctgagctctagaactgcagggtacaagtcactgctgaagatcaccatgacccagtccacagtgcccctgaacctcattagggttcacctgatggtggctgtcgaggggcatctcttccagaagtcattccaggcttctcccaacctggcctacaccttcatctgggacaagacagatgcgtatggccaaagggtgtatggactctcagatgctgttgtgtctgtcgggtttgaatatgagacctgtcccagtctaattctctgggagaaaaggacagccctccttcagggattcgagctggacccctccaacctcggtggctggtccctagacaaacaccacatcctcaatgttaaaagtggaatcctacacaaaggcactggggaaaaccagttcctgacccagcagcctgccatcatcaccagcatcatgggcaatggtcgccgccggagcatttcctgtcccagctgcaacggccttgctgaaggcaacaagctgctggccccagtggctctggctgttggaatcgatgggagcctctatgtgggtgacttcaattacatccgacgcatctttccctctcgaaatgtgaccagcatcttggagttacgaaataaagagtttaaacatagcaacaacccagcacacaagtactacttggcagtggaccccgtgtccggctcgctctacgtgtccgacaccaacagcaggagaatctaccgcgtcaagtctctgagtggaaccaaagacctggctgggaattcggaagttgtggcagggacgggagagcagtgtctaccctttgatgaagcccgctgcggggatggagggaaggccatagatgcaaccctgatgagcccgagaggtattgcagtagacaagaatgggctcatgtactttgtcgatgccaccatgatccggaaggttgaccagaatggaatcatctccaccctgctgggctccaatgacctcactgccgtccggccgctgagctgtgattccagcatggatgtagcccaggttcgtctggagtggccaacagaccttgctgtcaatcccatggataactccttgtatgttctagagaacaatgtcatccttcgaatcaccgagaaccaccaagtcagcatcattgcgggacgccccatgcactgccaagttcctggcattgactactcactcagcaaactagccattcactctgccctggagtcagccagtgccattgccatttctcacactggggtcctctacatcactgagacagatgagaagaagattaaccgtctacgccaggtaacaaccaacggggagatctgccttttagctggggcagcctcggactgcgactgcaaaaacgatgtcaattgcaactgctattcaggagatgatgcctacgcgactgatgccatcttgaattccccatcatccttagctgtagctccagatggtaccatttacattgcagaccttggaaatattcggatcagggcggtcagcaagaacaagcctgttcttaatgccttcaaccagtatgaggctgcatcccccggagagcaggagttatatgttttcaacgctgatggcatccaccaatacactgtgagcctggtgacaggggagtacttgtacaatttcacatatagtactgacaatgatgtcactgaattgattgacaataatgggaattccctgaagatccgtcgggacagcagtggcatgccccgtcacctgctcatgcctgacaaccagatcatcaccctcaccgtgggcaccaatggaggcctcaaagtcgtgtccacacagaacctggagcttggtctcatgacctatgatggcaacactgggctcctggccaccaagagcgatgaaacaggatggacgactttctatgactatgaccacgaaggccgcctgaccaacgtgacgcgccccacgggggtggtaaccagtctgcaccgggaaatggagaaatctattaccattgacattgagaactccaaccgtgatgatgacgtcactgtcatcaccaacctctcttcagtagaggcctcctacacagtggtacaagatcaagttcggaacagctaccagctctgtaataatggtaccctgagggtgatgtatgctaatgggatgggtatcagcttccacagcgagccccatgtcctagcgggcaccatcacccccaccattggacgctgcaacatctccctgcctatggagaatggcttaaactccattgagtggcgcctaagaaaggaacagattaaaggcaaagtcaccatctttggcaggaagctccgggtccatggaagaaatctcttgtccattgactatgatcgaaatattcggactgaaaagatctatgatgaccaccggaagttcaccctgaggatcatttatgaccaggtgggccgccccttcctctggctgcccagcagcgggctggcagctgtcaacgtgtcatacttcttcaatgggcgcctggctgggcttcagcgtggggccatgagcgagaggacagacatcgacaagcaaggccgcatcgtgtcccgcatgttcgctgacgggaaagtgtggagctactcctaccttgacaagtccatggtcctcctgcttcagagccaacgtcagtatatatttgagtatgactcctctgaccgcctccttgccgtcaccatgcccagcgtggcccggcacagcatgtccacacacacctccatcggctacatccgtaatatttacaacccgcctgaaagcaatgcttcggtcatctttgactacagtgatgacggccgcatcctgaagacctcctttttgggcaccggacgccaggtgttctacaagtatgggaaactctccaagttatcagagattgtctacgacagtaccgccgtcaccttcgggtatgacgagaccactggtgtcttgaagatggtcaacctccaaagtgggggcttctcctgcaccatcaggtaccggaagattggccccctggtggacaagcagatctacaggttctccgaggaaggcatggtcaatgccaggtttgactacacctatcatgacaacagcttccgcatcgcaagcatcaagcccgtcataagtgagactcccctccccgttgacctctaccgctatgatgagatttctggcaaggtggaacactttggtaagtttggagtcatctattatgacatcaaccagatcatcaccactgccgtgatgaccctcagcaaacacttcgacacccatgggcggatcaaggaggtccagtatgagatgttccggtccctcatgtactggatgacggtgcaatatgacagcatgggcagggtgatcaagagggagctaaaactggggccctatgccaataccacgaagtacacctatgactacgatggggacgggcagctccagagcgtggccgtcaatgaccgcccgacctggcgctacagctatgaccttaatgggaatctccacttactgaacccaggcaacagtgtgcgcctcatgcccttgcgctatgacctccgggatcggataaccagactcggggatgtgcagtacaaaattgacgacgatggctatctgtgccagagagggtctgacatcttcgaatacaattccaagggcctcctaacaagagcctacaacaaggccagcgggtggagtgtccagtaccgctatgatggcgtaggacggcgggcttcctacaagaccaacctgggccaccacctgcagtacttctactctgacctccacaacccgacgcgcatcacccatgtctacaatcactccaactcggagattacctcactgtactacgacctccagggccacctctttgccatggagagcagcagtggggaggagtactatgttgcctctgataacacagggactcctctggctgtgttcagcatcaacggcctcatgatcaaacagctgcagtacacggcctatggggagatttattatgactccaaccccgacttccagatggtcattggcttccatgggggactctatgaccccctgaccaagctggtccacttcactcagcgtgattatgatgtgctggcaggacgatggacctccccagactataccatgtggaaaaacgtgggcaaggagccggccccctttaacctgtatatgttcaagagcaacaatcctctcagcagtgagctagatttgaagaactacgtgacagatgtgaaaagctggcttgtgatgtttggatttcagcttagcaacatcattcctggcttcccgagagccaaaatgtatttcgtgcctcctccctatgaattgtcagagagtcaagcaagtgagaatggacagctcattacaggtgtccaacagacaacagagagacataaccaggccttcatggctctggaaggacaggtcattactaaaaagctccacgccagcatccgagagaaagcaggtcactggtttgccaccaccacgcccatcattggcaaaggcatcatgtttgccatcaaagaagggcgggtgaccacgggcgtgtccagcatcgccagcgaagatagccgcaaggtggcatctgtgctgaacaacgcctactacctggacaagatgcactacagcatcgagggcaaggacacccactactttgtgaagattggctcagccgatggcgacctggtcacactaggcaccaccatcggccgcaaggtgctagagagcggggtgaacgtgaccgtgtcccagcccacgctgctggtcaacggcaggactcgaaggttcacgaacattgagttccagtactccacgctgctgctcagcatccgctatggcctcacccccgacaccctggacgaagagaaggcccgcgtcctggaccaggcgagacagagggccctgggcacggcctgggccaaggagcagcagaaagccagggacgggagagaggggagccgcctgtggactgagggcgagaagcagcagcttctgagcaccgggcgcgtgcaagggtacgagggatattacgtgcttcccgtggagcaatacccagagcttgcagacagtagcagcaacatccagtttttaagacagaatgagatgggaaagaggtaacaaaataatctgctgccattccttgtctgaatggctcagcaggagtaactgttatctcctctcctaaggagatgaagacctaacaggggcactgcggctgggctgctttaggagaccaagtggcaagaaagctcacattttttgagttcaaatgctactgtccaagcgagaagtccctcatcctgaagtagactaaagcccggctgaaaattccgaggaaaacaaaacaaacgaatgaatgaacagacacacacaatgttccaagttcccctaaaatatgacccacttgttctgggtctacgcagaaaagagacgcaaagtgtccaaaaggaacaaaagaacaaaaacgaataagcaaagaagaaaacaaacaaaaacaaaacaaaacaaacacacggaccgataaacaaagaagcgaagataagaaagaaggcctcatatccaattacctcactcattcacatgtgagcgacacgcagacatccgcgagggccagcgtcaccagaccagctgcgggacaaaccactcagactgcttgtaggacaaatacttctgacattttcgtttaagcaaatacaggtgcatttaaaacacgactttgggggtgatttgtgtgtagcgcctggggaggggggataaaagaggaggagtgagcactggaaatactttttaaagaaaaaaaaacatgagggaataaaagaaattcctatcaaaaatcaaagtgaaataataccatccagcacttaactctcaggtcccaactaagtctggcctgagctaatttatttgagcgcagagtgtaaaatttaattcaaaatggtggctataatcactacagataaatttcatactcttttgtctttggagattccattgtggacagtaatacgcagttacagggtgtagtctgtttagattccgtagttcgtgggtatcagtttcggtagaggtgcagcatcgtgacacttttgctaacaggtaccacttctgatcaccctgtacatacatgagccgaaaggcacaatcactgtttcagatttaaaattattagtgtgtttgtttggtccagaaactgagacaatcacatgacagtcaccacgaggagagaaaatttaaaaaataaaaataaaaacaaaaaaaattttaaaaattaaaaaaacaaaaataaagtctaataagaactttggtacaggaacttttttgtaatatacatgtatgaattgttcatcgagtttttatattaattttaatttgctgctaagcaaagactagggacaggcaaagataatttatggcaaagtgtttaaattgtttatacatgaataaagtctctaaaactccaaaaaaaaaaaaaaaaaa

SEQ ID NO: 82 - protein, 2633 aa, Homo sapiens
MDVKDRRHRSLTRGRCGKECRYTSSSLDSEDCRVPTQKSYSSSETLKAYDHDSRMHYGNRVTDLIHRESDEFPRQGTNFTLAELGICEPSPHRSGYCSDMGILHQGYSLSTGSDADSDTEGGMSPEHAIRLWGRGIKSRRSSGLSSRENSALTLTDSDNENKSDDENGPPNHHSQSTLRPPLPPPHNHTLSHHHSSANSLNRNSLTNRRSQIHAPAPAPNDLATTPESVQLQDSWVLNSNVPLETRHFLFKTSSGSTPLFSSSSPGYPLTSGTVYTPPPRLLPRNTFSRKAFKLKKPSKYCSWKCAALSAIAAALLLAILLAYFIAMHLLGLNWQLQPADGHTFNNGIRTGLPGNDDVATMPSGGKVPWSLKNSSIDSGEAEVGRRVTQEVPPGVFWRSQIHISQPQFLKFNISLGKDALFGVYIRRGLPPSHAQYDFMERLDGKEKWSVVESPRERRSIQTLVQNEAVFVQYLDVGLWHLAFYNDGKDKEMVSFNTVVLDSVQDCPRNCHGNGECVSGVCHCFPGFLGADCAKAACPVLCSGNGQYSKGTCQCYSGWKGAECDVPMNQCIDPSCGGHGSCIDGNCVCSAGYKGEHCEEVDCLDPTCSSHGVCVNGECLCSPGWGGLNCELARVQCPDQCSGHGTYLPDTGLCSCDPNWMGPDCSVDGCPDLCNGNGRCTLGQNSWQCVCQTGWRGPGCNVAMETSCADNKDNEGDGLVDCLDPDCCLQSACQNSLLCRGSRDPLDIIQQGQTDWPAVKSFYDRIKLLAGKDSTHIIPGENPFNSSLVSLIRGQVVTTDGTPLVGVNVSFVKYPKYGYTITRQDGTFDLIANGGASLTLHFERAPFMSQERTVWLPWNSFYAMDTLVMKTEENSIPSCDLSGFVRPDPIIISSPLSTFFSAAPGQNPIVPETQVLHEEIELPGSNVKLRYLSSRTAGYKSLLKITMTQSTVPLNLIRVHLMVAVEGHLFQKSFQASPNLAYTFIWDKTDAYGQRVYGLSDAVVSVGFEYETCPSLILWEKRTALLQGFELDPSNLGGWSLDKHHILNVKSGILHKGTGENQFLTQQPAIITSIMGNGRRRSISCPSCNGLAEGNKLLAPVALAVGIDGSLYVGDFNYIRRIFPSRNVTSILELRNKEFKHSNNPAHKYYLAVDPVSGSLYVSDTNSRRIYRVKSLSGTKDLAGNSEVVAGTGEQCLPFDEARCGDGGKAIDATLMSPRGIAVDKNGLMYFVDATMIRKVDQNGIISTLLGSNDLTAVRPLSCDSSMDVAQVRLEWPTDLAVNPMDNSLYVLENNVILRITENHQVSIIAGRPMHCQVPGIDYSLSKLAIHSALESASAIAISHTGVLYITETDEKKINRLRQVTTNGEICLLAGAASDCDCKNDVNCNCYSGDDAYATDAILNSPSSLAVAPDGTIYIADLGNIRIRAVSKNKPVLNAFNQYEAASPGEQELYVFNADGIHQYTVSLVTGEYLYNFTYSTDNDVTELIDNNGNSLKIRRDSSGMPRHLLMPDNQIITLTVGTNGGLKVVSTQNLELGLMTYDGNTGLLATKSDETGWTTFYDYDHEGRLTNVTRPTGVVTSLHREMEKSITIDIENSNRDDDVTVITNLSSVEASYTVVQDQVRNSYQLCNNGTLRVMYANGMGISFHSEPHVLAGTITPTIGRCNISLPMENGLNSIEWRLRKEQIKGKVTIFGRKLRVHGRNLLSIDYDRNIRTEKIYDDHRKFTLRIIYDQVGRPFLWLPSSGLAAVNVSYFFNGRLAGLQRGAMSERTDIDKQGRIVSRMFADGKVWSYSYLDKSMVLLLQSQRQYIFEYDSSDRLLAVTMPSVARHSMSTHTSIGYIRNIYNPPESNASVIFDYSDDGRILKTSFLGTGRQVFYKYGKLSKLSEIVYDSTAVTFGYDETTGVLKMVNLQSGGFSCTIRYRKIGPLVDKQIYRFSEEGMVNARFDYTYHDNSFRIASIKPVISETPLPVDLYRYDEISGKVEHFGKFGVIYYDINQIITTAVMTLSKHFDTHGRIKEVQYEMFRSLMYWMTVQYDSMGRVIKRELKLGPYANTTKYTYDYDGDGQLQSVAVNDRPTWRYSYDLNGNLHLLNPGNSVRLMPLRYDLRDRITRLGDVQYKIDDDGYLCQRGSDIFEYNSKGLLTRAYNKASGWSVQYRYDGVGRRASYKTNLGHHLQYFYSDLHNPTRITHVYNHSNSEITSLYYDLQGHLFAMESSSGEEYYVASDNTGTPLAVFSINGLMIKQLQYTAYGEIYYDSNPDFQMVIGFHGGLYDPLTKLVHFTQRDYDVLAGRWTSPDYTMWKNVGKEPAPFNLYMFKSNNPLSSELDLKNYVTDVKSWLVMFGFQLSNIIPGFPRAKMYFVPPPYELSESQASENGQLITGVQQTTERHNQAFMALEGQVITKKLHASIREKAGHWFATTTPIIGKGIMFAIKEGRVTTGVSSIASEDSRKVASVLNNAYYLDKMHYSIEGKDTHYFVKIGSADGDLVTLGTTIGRKVLESGVNVTVSQPTLLVNGRTRRFTNIEFQYSTLLLSIRYGLTPDTLDEEKARVLDQARQRALGTAWAKEQQKARDGREGSRLWTEGEKQQLLSTGRVQGYEGYYVLPVEQYPELADSSSNIQFLRQNEMGKR

SEQ ID NO: 83 - DNA, 4248 bp, Homo sapiens
  CDS (189)..(2720)
aagacctccatcagctcgccgcgcagcgcggctgtatttgcggcctgtgcgagtaggcgcttgggcactcagtctccctggcgagcgacgggcagaaatctcgaaccagtggagcgcactcgtaacctggatcccagaaggtcgcgaaggcagtaccgtttcctcagcggcggactgctgcagtaagaatgtcttttccacctcatttgaatcgccctcccatgggaatcccagcactcccaccagggatcccacccccgcagtttccaggatttcctccacctgtacctccagggaccccaatgattcctgtaccaatgagcattatggctcctgctccaactgtcttagtacccactgtgtctatggttggaaagcatttgggcgcaagaaaggatcatccaggcttaaaggctaaagaaaatgatgaaaattgtggtcctactaccactgtttttgttggcaacatttccgagaaagcttcagacatgcttataagacaactcttagctaaatgtggtttggttttgagctggaagagagtacaaggtgcttccggaaagcttcaagccttcggattctgtgagtacaaggagccagaatctaccctccgtgcactcagattattacatgacctgcaaattggagagaaaaagctactcgttaaagttgatgcaaagacaaaggcacagctggatgaatggaaagcaaagaagaaagcttctaatgggaatgcaaggccagaaactgtcactaatgacgatgaagaagccttggatgaagaaacaaagaggagagatcagatgattaaaggggctattgaagttttaattcgtgaatactccagtgagctaaatgccccctcacaggaatctgattctcaccccaggaagaagaagaaggaaaagaaggaggacattttccgcagatttccagtggccccactgatcccttatccactcatcactaaggaggatataaatgctatagaaatggaagaagacaaaagagacctgatatctcgagagatcagcaaattcagagacacacataagaaactggaagaagagaaaggcaaaaaggaaaaagaaagacaggaaattgagaaagaacggagagaaagagagagggagcgtgaaagggaacgagaaaggcgagaacgggaacgagaaagggaaagagaacgtgaacgagaaaaggagaaagaacgggagcgggaacgagaacgggatagggaccgtgaccggacaaaagagagagaccgagatcgggatcgagagagagatcgtgaccgggatagagaaaggagctcagatcgtaataaggatcgcagtcgatcaagagaaaaaagcagagatcgtgaaagggaacgagagcgggaaagagagagagagagagaacgagagcgagaacgagaacgggagcgagagagagagcgagagagggaacgggagcgagaaagagaaaaagacaaaaaacgggaccgagaagaagatgaagaagatgcatacgaacgaagaaaacttgaaagaaaactccgagagaaagaagctgcttatcaagagcgccttaagaattgggaaatcagagaacgaaagaaaacccgggaatatgagaaagaagctgaaagagaagaagaaagaagaagagaaatggccaaagaagctaaacgactaaaagaattcttagaagactatgatgatgatagagatgaccccaaatattacagaggaagtgctcttcagaaaaggttgcgtgatagagaaaaggaaatggaagcagatgaacgagataggaagagagagaaggaggagcttgaggaaatcaggcagcgccttctggcagaagggcatccagatccagatgcagagctccagaggatggaacaagaggctgagaggcgcaggcagccacaaataaagcaagagccagaatcagaagaggaggaagaagaaaagcaagaaaaagaagaaaaacgagaagaacccatggaagaggaagaggagccagagcaaaagccttgtctgaaacctactctgaggcccatcagctctgctccatctgtttcctctgccagtggcaatgcaacacctaacactcctggggatgagtctccctgtggtattattattcctcatgaaaactcaccagatcaacagcaacctgaggagcataggccaaaaataggactaagtcttaaactgggtgcttccaatagtcctggtcagcctaattctgtgaagagaaagaaactacctgtagatagtgtctttaacaaatttgaggatgaagacagtgatgacgtaccccgaaaaaggaaactggttcccttggattatggtgaagatgataaaaatgcaaccaaaggcactgtaaacactgaagaaaagcgtaaacacattaagagtctcattgagaaaatccctacagccaaacctgagctcttcgcttatcccctggattggtctattgtggattctatactgatggaacgtcgaattagaccatggattaataagaaaatcatagaatatataggtgaagaagaagctacattagttgattttgtttgttctaaggttatggctcatagttcaccccagagcattttagatgatgttgccatggtacttgatgaagaagcagaagtttttatagtcaaaatgtggagattattgatatatgaaacagaagccaagaaaattggtcttgtgaagtaaaactttttatatttagagttccatttcagatttcttctttgccacccttttaaggactttgaatttttctttgtctttgaagacattgtgagatctgtaattttttttttttgtagaaaatgtgaattttttggtcctctaatttgttgttgccctgtgtactcccttggttgtaaagtcatctgaatccttggttctctttatactcaccaggtacaaattactggtatgttttataagccgcagctactgtacacagcctatctgatataatcttgttctgctgatttgtttcttgtaaatattaaaacgactccccaattattttgcagaattgcacttaatattgaaatgtactgtataggaaccaacatgaacaattttaattgaaaacaccagtcataaactattaccacccccactctcttttgatcagaaatggcaagcccttgtgaaggcatggagtttaaaattggaatgcaaaaattagcagacaatccattcctactgtatttctgtatgaatgtgtttgtgaatgtatgtgtaaaagtctttcttttccctaatttgctttggtggggtccttaaaacatttcccaactaaagaatagaattgtaaaggaaaagtggtactgttccaacctgaaatgtctgttataattaggttattagtttcccagagcatggtgttctcgtgtcgtgagcaatgtggtttgctaactggatggggttttcttattaataagatggctgcttcagcttctcttttaaaggaatgtggatcatagtgatttttccttttaattttattgctcagaaatgaggcatatcctaaaaatcctggagagctgtatttaatgcatttttgcactaattggtccttagtttaattctattgtatctgtttatttaacaaaaaattcatcataccaaaaagtgtaagtgaaaaccccctttaaaacaaaacaaaaaaatgaaataaaattaggcaaattgacagacagtgagagttttacaaacatgataggtattctgctcggcaatttgtaagtttacatgttatttaaggataaaggtaaatcattcaaggcagttaccaaccactaactatttgttttcatttttgtcttgtagaaggtttatatcttgttttaccttggctcattagtgtttaaaaatgtactgatgatgtgcttagagaaattcctggggctttcttcgttgtagatcagaatttcaccagggagtaaaattacctgaaaacgtaagaagttttaaacagcttttcacacaaattagatgcaactgttcccatgtctgagtacttatttaaaagaaaggtaaagattggcctgttagaaaaagcataatgtgagctttggattactggattttttttttttttaaacacacctggagaggacatttgaaaacactgttcttaccctcgaaccctgatgtggttccattatgtaaatatttcaaatattaaaaatgtatatatttgaaaaaaaaaaaaaaaaaaaaa

SEQ ID NO: 84 - protein, 843 aa, Homo sapiens
MSFPPHLNRPPMGIPALPPGIPPPQFPGFPPPVPPGTPMIPVPMSIMAPAPTVLVPTVSMVGKHLGARKDHPGLKAKENDENCGPTTTVFVGNISEKASDMLIRQLLAKCGLVLSWKRVQGASGKLQAFGFCEYKEPESTLRALRLLHDLQIGEKKLLVKVDAKTKAQLDEWKAKKKASNGNARPETVTNDDEEALDEETKRRDQMIKGAIEVLIREYSSELNAPSQESDSHPRKKKKEKKEDIFRRFPVAPLIPYPLITKEDINAIEMEEDKRDLISREISKFRDTHKKLEEEKGKKEKERQEIEKERRERERERERERERREREREREREREREKEKERERERERDRDRDRTKERDRDRDRERDRDRDRERSSDRNKDRSRSREKSRDREREREREREREREREREREREREREREREREREREKDKKRDREEDEEDAYERRKLERKLREKEAAYQERLKNWEIRERKKTREYEKEAEREEERRREMAKEAKRLKEFLEDYDDDRDDPKYYRGSALQKRLRDREKEMEADERDRKREKEELEEIRQRLLAEGHPDPDAELQRMEQEAERRRQPQIKQEPESEEEEEEKQEKEEKREEPMEEEEEPEQKPCLKPTLRPISSAPSVSSASGNATPNTPGDESPCGIIIPHENSPDQQQPEEHRPKIGLSLKLGASNSPGQPNSVKRKKLPVDSVFNKFEDEDSDDVPRKRKLVPLDYGEDDKNATKGTVNTEEKRKHIKSLIEKIPTAKPELFAYPLDWSIVDSILMERRIRPWINKKIIEYIGEEEATLVDFVCSKVMAHSSPQSILDDVAMVLDEEAEVFIVKMWRLLIYETEAKKIGLVK

SEQ ID NO: 85 - DNA, 4056 bp, Homo sapiens
  CDS (189)..(2528)
aagacctccatcagctcgccgcgcagcgcggctgtatttgcggcctgtgcgagtaggcgcttgggcactcagtctccctggcgagcgacgggcagaaatctcgaaccagtggagcgcactcgtaacctggatcccagaaggtcgcgaaggcagtaccgtttcctcagcggcggactgctgcagtaagaatgtcttttccacctcatttgaatcgccctcccatgggaatcccagcactcccaccagggatcccacccccgcagtttccaggatttcctccacctgtacctccagggaccccaatgattcctgtaccaatgagcattatggctcctgctccaactgtcttagtacccactgtgtctatggttggaaagcatttgggcgcaagaaaggatcatccaggcttaaaggctaaagaaaatgatgaaaattgtggtcctactaccactgtttttgttggcaacatttccgagaaagcttcagacatgcttataagacaactcttagctaaatgtggtttggttttgagctggaagagagtacaaggtgcttccggaaagcttcaagccttcggattctgtgagtacaaggagccagaatctaccctccgtgcactcagattattacatgacctgcaaattggagagaaaaagctactcgttaaagttgatgcaaagacaaaggcacagctggatgaatggaaagcaaagaagaaagcttctaatgggaatgcaaggccagaaactgtcactaatgacgatgaagaagccttggatgaagaaacaaagaggagagatcagatgattaaaggggctattgaagttttaattcgtgaatactccagtgagctaaatgccccctcacaggaatctgattctcaccccaggaagaagaagaaggaaaagaaggaggacattttccgcagatttccagtggccccactgatcccttatccactcatcactaaggaggatataaatgctatagaaatggaagaagacaaaagagacctgatatctcgagagatcagcaaattcagagacacacataagaaactggaagaagagaaaggcaaaaaggaaaaagaaagacaggaaattgagaaagaacggagagaaagagagagggagcgtgaaagggaacgagaaaggcgagaacgggaacgagaaagggaacgagagcgggaaagagagagagagagagaacgagagcgagaacgagaacgggagcgagagagagagcgagagagggaacgggagcgagaaagagaaaaagacaaaaaacgggaccgagaagaagatgaagaagatgcatacgaacgaagaaaacttgaaagaaaactccgagagaaagaagctgcttatcaagagcgccttaagaattgggaaatcagagaacgaaagaaaacccgggaatatgagaaagaagctgaaagagaagaagaaagaagaagagaaatggccaaagaagctaaacgactaaaagaattcttagaagactatgatgatgatagagatgaccccaaatattacagaggaagtgctcttcagaaaaggttgcgtgatagagaaaaggaaatggaagcagatgaacgagataggaagagagagaaggaggagcttgaggaaatcaggcagcgccttctggcagaagggcatccagatccagatgcagagctccagaggatggaacaagaggctgagaggcgcaggcagccacaaataaagcaagagccagaatcagaagaggaggaagaagaaaagcaagaaaaagaagaaaaacgagaagaacccatggaagaggaagaggagccagagcaaaagccttgtctgaaacctactctgaggcccatcagctctgctccatctgtttcctctgccagtggcaatgcaacacctaacactcctggggatgagtctccctgtggtattattattcctcatgaaaactcaccagatcaacagcaacctgaggagcataggccaaaaataggactaagtcttaaactgggtgcttccaatagtcctggtcagcctaattctgtgaagagaaagaaactacctgtagatagtgtctttaacaaatttgaggatgaagacagtgatgacgtaccccgaaaaaggaaactggttcccttggattatggtgaagatgataaaaatgcaaccaaaggcactgtaaacactgaagaaaagcgtaaacacattaagagtctcattgagaaaatccctacagccaaacctgagctcttcgcttatcccctggattggtctattgtggattctatactgatggaacgtcgaattagaccatggattaataagaaaatcatagaatatataggtgaagaagaagctacattagttgattttgtttgttctaaggttatggctcatagttcaccccagagcattttagatgatgttgccatggtacttgatgaagaagcagaagtttttatagtcaaaatgtggagattattgatatatgaaacagaagccaagaaaattggtcttgtgaagtaaaactttttatatttagagttccatttcagatttcttctttgccacccttttaaggactttgaatttttctttgtctttgaagacattgtgagatctgtaattttttttttttgtagaaaatgtgaattttttggtcctctaatttgttgttgccctgtgtactcccttggttgtaaagtcatctgaatccttggttctctttatactcaccaggtacaaattactggtatgttttataagccgcagctactgtacacagcctatctgatataatcttgttctgctgatttgtttcttgtaaatattaaaacgactccccaattattttgcagaattgcacttaatattgaaatgtactgtataggaaccaacatgaacaattttaattgaaaacaccagtcataaactattaccacccccactctcttttgatcagaaatggcaagcccttgtgaaggcatggagtttaaaattggaatgcaaaaattagcagacaatccattcctactgtatttctgtatgaatgtgtttgtgaatgtatgtgtaaaagtctttcttttccctaatttgctttggtggggtccttaaaacatttcccaactaaagaatagaattgtaaaggaaaagtggtactgttccaacctgaaatgtctgttataattaggttattagtttcccagagcatggtgttctcgtgtcgtgagcaatgtggtttgctaactggatggggttttcttattaataagatggctgcttcagcttctcttttaaaggaatgtggatcatagtgatttttccttttaattttattgctcagaaatgaggcatatcctaaaaatcctggagagctgtatttaatgcatttttgcactaattggtccttagtttaattctattgtatctgtttatttaacaaaaaattcatcataccaaaaagtgtaagtgaaaaccccctttaaaacaaaacaaaaaaatgaaataaaattaggcaaattgacagacagtgagagttttacaaacatgataggtattctgctcggcaatttgtaagtttacatgttatttaaggataaaggtaaatcattcaaggcagttaccaaccactaactatttgttttcatttttgtcttgtagaaggtttatatcttgttttaccttggctcattagtgtttaaaaatgtactgatgatgtgcttagagaaattcctggggctttcttcgttgtagatcagaatttcaccagggagtaaaattacctgaaaacgtaagaagttttaaacagcttttcacacaaattagatgcaactgttcccatgtctgagtacttatttaaaagaaaggtaaagattggcctgttagaaaaagcataatgtgagctttggattactggattttttttttttttaaacacacctggagaggacatttgaaaacactgttcttaccctcgaaccctgatgtggttccattatgtaaatatttcaaatattaaaaatgtatatatttgaaaaaaaaaaaaaaaaaaaaa

SEQ ID NO: 86 - protein, 779 aa, Homo sapiens
MSFPPHLNRPPMGIPALPPGIPPPQFPGFPPPVPPGTPMIPVPMSIMAPAPTVLVPTVSMVGKHLGARKDHPGLKAKENDENCGPTTTVFVGNISEKASDMLIRQLLAKCGLVLSWKRVQGASGKLQAFGFCEYKEPESTLRALRLLHDLQIGEKKLLVKVDAKTKAQLDEWKAKKKASNGNARPETVTNDDEEALDEETKRRDQMIKGAIEVLIREYSSELNAPSQESDSHPRKKKKEKKEDIFRRFPVAPLIPYPLITKEDINAIEMEEDKRDLISREISKFRDTHKKLEEEKGKKEKERQEIEKERRERERERERERERREREREREREREREREREREREREREREREREREREREREKDKKRDREEDEEDAYERRKLERKLREKEAAYQERLKNWEIRERKKTREYEKEAEREEERRREMAKEAKRLKEFLEDYDDDRDDPKYYRGSALQKRLRDREKEMEADERDRKREKEELEEIRQRLLAEGHPDPDAELQRMEQEAERRRQPQIKQEPESEEEEEEKQEKEEKREEPMEEEEEPEQKPCLKPTLRPISSAPSVSSASGNATPNTPGDESPCGIIIPHENSPDQQQPEEHRPKIGLSLKLGASNSPGQPNSVKRKKLPVDSVFNKFEDEDSDDVPRKRKLVPLDYGEDDKNATKGTVNTEEKRKHIKSLIEKIPTAKPELFAYPLDWSIVDSILMERRIRPWINKKIIEYIGEEEATLVDFVCSKVMAHSSPQSILDDVAMVLDEEAEVFIVKMWRLLIYETEAKKIGLVK

SEQ ID NO: 87 - DNA, 5866 bp, Homo sapiens
  CDS (1)..(5721)
atgattaagagggactgtgggtatcctggtctccgcgtgtgtgagtaccgcggcgcgaggttagtggtagctgggtgcagacgccgtggcgctggagacccaaacatggcaaacctggaagaaagcttcccccgaggaggtacaagaaagatccacaaaccagagaaagctttccagcagtcagttgaacaagacaacttatttgatatttctactgaagagggatccaccaaaagaaaaaagagccagaaggggccagcaaaaacaaaaaagttgaaaatcgaaaagagagaaagcagcaagtccgcaagagagaagtttgaaatccttagtgttgagtccctgtgtgagggaatgcgtattttgggttgcgtgaaagaggtgaatgaactggaactggtgattagtctccccaatggcctccagggctttgtgcaagtcactgaaatctgtgatgcctacaccaaaaagctgaatgagcaggtgacacaagaacaacctctgaaggacctacttcacttgcctgaacttttctcacctggaatgctggtaagatgtgtggtgagcagtctgggcatcacagacaggggcaagaagagtgtcaagctgtctctgaaccccaaaaatgtcaacagagtgctgagtgctgaggccctgaagcctggcatgctacttacaggtaccgtatccagcctggaagaccatggctacctagtggacattggtgttgatgggaccagagcttttctgccactgctgaaagcccaggagtacatcagacagaagaacaaaggtgctaaactaaaggtgggtcagtacctgaactgcattgttgaaaaggtgaaaggcaacggaggagttgttagtctgtctgttggtcactcagaggtttctacggccattgctactgaacagcagagctggaaccttaataacttgctaccaggactggtggtcaaagctcaggtacagaaggtgactccatttggccttacgctaaacttcctcacattcttcacgggcgtggttgactttatgcacctggatcccaagaaagctggaacatatttctcaaatcaggcagtgagggcctgcatcctttgcgtccatcctcgaaccagagttgtgcacctgagcctgcgccccatcttcctacagcctggacgcccactcacccgactctcttgccagaaccttggagcagtgctggatgatgttcctgtccagggttttttcaaaaaggctggggccacctttaggctgaaggatggggttctggcctatgcccggctcagccatctctctgattctaagaacgtcttcaatcctgaggccttcaagccagggaacactcacaagtgtagaattattgactacagccaaatggatgaactggccttgctctctctacgaacgtctattattgaagctcagtaccttagatatcatgacatcgaacctggggcagtggtaaagggcacagtgctaaccataaagtcatatgggatgctggtgaaggtgggcgagcagatgaggggcctggtacctcccatgcacctggctgacatcctgatgaagaatccggagaagaagtaccacatcggggatgaggtcaagtgccgggttttgctttgtgaccctgaagccaagaagctgatgatgaccctgaaaaaaaccctgattgagtccaaactacctgtcattacctgctatgccgatgccaagcctggtctgcagacacatggcttcatcatcagggtcaaggactatggctgcattgtgaagttctacaacaatgtgcagggactggtgcccaagcatgagctcagtactgagtatatccctgacccggagagagttttttacactggccaggtggtgaaggttgtcgtattgaactgtgagccatccaaagagaggatgctcttatccttcaagctgtcgagtgatccagagccaaagaaagagcctgcaggacacagtcagaagaaaggaaaagccattaacattgggcagttggtagatgtgaaggttttagagaagaccaaagatgggctggaggtggctgtcctgccccacaacatccgtgctttcctccccacatctcatctgtcggaccacgttgccaacggcccattgttacatcattggctccaggcaggtgacatccttcaccgagtcctgtgtctgagccagagcgaggggcgtgttcttctttgcaggaagccagccttggtctccacagtagaaggtggccaggatcccaagaacttctcagaaatccatcctggaatgctgctcattggttttgtgaagagcatcaaggactatggcgtgttcatccagttcccctcaggtcttagcggactggccccaaaagctatcatgagtgacaaatttgtgacctccacaagtgaccactttgttgagggccagacagtagcggcaaaggtgaccaatgtggatgaggagaagcagcggatgctgctgtcactgcggctgtcggactgtggtctgggggacttggctatcaccagcctcctcctcctgaatcagtgcctggaggagctgcagggcgtgcgcagccttatgagcaaccgagactctgtgttgatccagacgctggccgagatgaccccaggaatgttccttgacctagtggtgcaggaggtgttggaagatggctctgtggtattcagtgggggtccagtgcccgacctggtcctgaaagccagcagataccatcgcgcagggcaggaggtggaatctgggcagaaaaagaaggttgttatcttaaatgttgatcttttgaagttggaagtgcacgtttcccttcaccaggacttggtgaatagaaaagctagaaagctgaggaaaggcagcgaacaccaggcgattgtgcagcacttggagaagtcctttgccattgcctccttggtagagacgggccacctggcagctttctccctgacctctcacctcaacgacaccttccgctttgactcagagaaattgcaggtgggacagggtgtctccctaaccctcaagaccacagaaccaggagtgactggccttcttttggctgtggaggggccggctgccaagaggaccatgaggccgacccagaaggactctgagacagttgatgaggatgaagaagtggatccagctctgactgtagggaccataaagaagcacaccctctccatcggggacatggtcacagggactgtcaagtccattaagcctacccatgtggttgtgactctggaagatggcattattggctgtatccatgcctcccacattctagatgatgttccagagggcacctctcctactaccaagctgaaggttgggaagacggtcactgcccgagtgattggcgggcgagacatgaagacattcaagtatctcccaataagtcaccccagattcgttcgaaccatcccggagctgagtgttcggccaagtgagctggaggatggccacactgctcttaacactcactctgttagccccatggagaagattaaacagtaccaggccggccagactgttacttgcttcttaaagaaatacaatgtggtgaagaaatggcttgaggtggagattgccccagacatccgggggagaattcccttattgctcacttctctgagcttcaaggttctgaagcatccagataagaagttccgggttggccaggccctgagggccaccgttgttggcccagattcctccaagaccctcttatgtctgtccctcacaggtcctcacaagcttgaggaaggggaagtggccatgggccgagtggtgaaggtgactcccaacgaggggctgaccgtctccttcccctttgggaagataggaacagtcagtatatttcacatgagtgactcctactccgagacgcccctggaagacttcgtcccccagaaggttgtcagatgttacatcctgtccactgcagacaacgtattgactttgtcgctgcgatcatccagaacaaacccggagacgaaaagcaaagtagaagatccagagattaactccatccaggacattaaggaagggcagcttctgaggggctatgtagggtccatccagccacacggtgtgttctttcgccttggcccctccgttgtgggtttggctcggtactcccatgtctcccagcacagcccgtccaagaaagccctttataacaaacacctccctgaagggaagctgctcacagccagggtcctacgccttaaccaccagaagaacctggtagagctgtctttcctccccggagacactgggaagccagacgtgctttctgcttccttggaagggcaacttacaaagcaagaggagaggaaaacagaggctgaggagagagaccaaaaaggggaaaagaaaaatcagaaaaggaacgagaagaagaaccagaaggggcaggaggaggtggagatgcccagcaaggagaagcaacagccccagaagccacaggcgcagaagcggggcgggcgggagtgccgggagtctgggagtgagcaggaaagagtgagcaagaagccaaagaaagccggcctgtcagaggaggacgacagccttgtggacgtgtactatcgggagggaaaagaggaggcagaagagacgaatgtgctgcccaaggagaagcaaaccaagccagcagaagcgccccggctgcagctgtcttcaggcttcgcttggaatgtgggactagactctctgaccccggccttgccacctctagcagagagctcagacagcgaggaggatgagaagccacaccaagccacgataaagaaaagcaagaaagaaagggagttggagaagcagaaggcagagaaggaactgtcccgcattgaggaggcgctgatggatcctgggcggcagccagagtccgcggatgattttgaccgactggtgctgagctcccccaacagctccattctgtggctgcagtacatggctttccacctgcaggccacggagatcgagaaggcccgtgccgtggctgagagggcccttaagaccatctccttcagagaggagcaggagaagctgaacgtgtgggtggctctgctgaacctggagaacatgtacggctctcaggagtccctgaccaaggtctttgagcgagccgtgcagtacaacgagcctctcaaagtctttctccacctggctgacatctacgccaagtcagagaaattccaggaagctggtgaactctacaaccggatgctgaagcgtttccggcaggagaaagctgtgtggatcaaatacggcgccttccttctgcggaggagccaggctgcagccagtcaccgcgtgctgcagcgagccctggagtgcctgcctagcaaggagcatgtggatgtcattgccaagtttgcccagcttgagtttcagctgggggatgcagagcgggccaaagccatttttgagaacacgctgagcacctacccaaagcgcacagatgtctggtcggtctatatcgacatgaccatcaagcacggcagccagaaggacgtccgggacatctttgagcgggtcattcatctgagcttggcccccaagagaatgaagttcttcttcaagcgctacctggactacgagaagcagcatggcactgagaaggatgtgcaggcagtcaaggccaaggccctggagtatgtggaggccaagagctcagtgctagaggactagtggcaggctggctctgtgggacactgtcaacaatgggccagcccggccccgcctcgagtgcctgggcactcggaaaactgttacctcaggactctatttaaatgctgctttttctgcagcacgcttggggaaatcctgtcaggat

SEQ ID NO: 88 - protein, 1906 aa, Homo sapiens
MIKRDCGYPGLRVCEYRGARLVVAGCRRRGAGDPNMANLEESFPRGGTRKIHKPEKAFQQSVEQDNLFDISTEEGSTKRKKSQKGPAKTKKLKIEKRESSKSAREKFEILSVESLCEGMRILGCVKEVNELELVISLPNGLQGFVQVTEICDAYTKKLNEQVTQEQPLKDLLHLPELFSPGMLVRCVVSSLGITDRGKKSVKLSLNPKNVNRVLSAEALKPGMLLTGTVSSLEDHGYLVDIGVDGTRAFLPLLKAQEYIRQKNKGAKLKVGQYLNCIVEKVKGNGGVVSLSVGHSEVSTAIATEQQSWNLNNLLPGLVVKAQVQKVTPFGLTLNFLTFFTGVVDFMHLDPKKAGTYFSNQAVRACILCVHPRTRVVHLSLRPIFLQPGRPLTRLSCQNLGAVLDDVPVQGFFKKAGATFRLKDGVLAYARLSHLSDSKNVFNPEAFKPGNTHKCRIIDYSQMDELALLSLRTSIIEAQYLRYHDIEPGAVVKGTVLTIKSYGMLVKVGEQMRGLVPPMHLADILMKNPEKKYHIGDEVKCRVLLCDPEAKKLMMTLKKTLIESKLPVITCYADAKPGLQTHGFIIRVKDYGCIVKFYNNVQGLVPKHELSTEYIPDPERVFYTGQVVKVVVLNCEPSKERMLLSFKLSSDPEPKKEPAGHSQKKGKAINIGQLVDVKVLEKTKDGLEVAVLPHNIRAFLPTSHLSDHVANGPLLHHWLQAGDILHRVLCLSQSEGRVLLCRKPALVSTVEGGQDPKNFSEIHPGMLLIGFVKSIKDYGVFIQFPSGLSGLAPKAIMSDKFVTSTSDHFVEGQTVAAKVTNVDEEKQRMLLSLRLSDCGLGDLAITSLLLLNQCLEELQGVRSLMSNRDSVLIQTLAEMTPGMFLDLVVQEVLEDGSVVFSGGPVPDLVLKASRYHRAGQEVESGQKKKVVILNVDLLKLEVHVSLHQDLVNRKARKLRKGSEHQAIVQHLEKSFAIASLVETGHLAAFSLTSHLNDTFRFDSEKLQVGQGVSLTLKTTEPGVTGLLLAVEGPAAKRTMRPTQKDSETVDEDEEVDPALTVGTIKKHTLSIGDMVTGTVKSIKPTHVVVTLEDGIIGCIHASHILDDVPEGTSPTTKLKVGKTVTARVIGGRDMKTFKYLPISHPRFVRTIPELSVRPSELEDGHTALNTHSVSPMEKIKQYQAGQTVTCFLKKYNVVKKWLEVEIAPDIRGRIPLLLTSLSFKVLKHPDKKFRVGQALRATVVGPDSSKTLLCLSLTGPHKLEEGEVAMGRVVKVTPNEGLTVSFPFGKIGTVSIFHMSDSYSETPLEDFVPQKVVRCYILSTADNVLTLSLRSSRTNPETKSKVEDPEINSIQDIKEGQLLRGYVGSIQPHGVFFRLGPSVVGLARYSHVSQHSPSKKALYNKHLPEGKLLTARVLRLNHQKNLVELSFLPGDTGKPDVLSASLEGQLTKQEERKTEAEERDQKGEKKNQKRNEKKNQKGQEEVEMPSKEKQQPQKPQAQKRGGRECRESGSEQERVSKKPKKAGLSEEDDSLVDVYYREGKEEAEETNVLPKEKQTKPAEAPRLQLSSGFAWNVGLDSLTPALPPLAESSDSEEDEKPHQATIKKSKKERELEKQKAEKELSRIEEALMDPGRQPESADDFDRLVLSSPNSSILWLQYMAFHLQATEIEKARAVAERALKTISFREEQEKLNVWVALLNLENMYGSQESLTKVFERAVQYNEPLKVFLHLADIYAKSEKFQEAGELYNRMLKRFRQEKAVWIKYGAFLLRRSQAAASHRVLQRALECLPSKEHVDVIAKFAQLEFQLGDAERAKAIFENTLSTYPKRTDVWSVYIDMTIKHGSQKDVRDIFERVIHLSLAPKRMKFFFKRYLDYEKQHGTEKDVQAVKAKALEYVEAKSSVLED

SEQ ID NO: 89 - DNA, 4276 bp, Homo sapiens
  CDS (392)..(3268)
ggcttttcttccccttctgattttcccctccccccttttctccctttccgggtttggttccccccttttcttcccctctcccccctccttcccaagcccctttcccctcccccgtcccagtcccccctgcttcccagccctcggccccggggaagccccggccgagaaaagcccgcccccagaagcgcgccgccgccggccgtcggggccgagccgcagccgagcggccgtgggcccgggcggcgggcggagacgtgggcgccctccccgccaaggcccgtgcgagaggttagacttgtttcttatatgtgatgccattccagcactggactcatggaggctgagcatttattcaggagtccatagaggccactgtattctattgaagaacatgtctaacagtaacactactcaagagaccctggaaataatgaaagaatcagaaaaaaaactggtggaagaatctgtaaacaaaaacaagtttatatctaagactccaagtaaggaagaaattgagaaagaatgtgaagataccagtttgcgtcaggagacacagaggcggacatctaaccatggtcatgccaggaaaagagccaagtctaattccaagctaaagttggtgcgtagcctggcagtgtgtgaggagtcctccaccccatttgctgatgggccattagaaacccaggatataattcaattgcacatcagttgcccttctgacaaggaggaagaaaagtccacaaaagatgtctctgaaaaggaagacaaggacaaaaacaaagaaaagatcccaaggaagatgctgtccagagactccagccaggaatatacggactccactggaatagacctacatgaatttcttgtaaatacactgaaaaagaacccaagggacagaatgatgctgctaaaattagaacaggagattctggaatttattaatgacaacaataatcagttcaagaagttccctcagatgacctcatatcaccggatgctattacaccgggtagctgcctattttgggatggaccacaatgttgatcaaactgggaaagctgtcatcatcaacaaaactagtaacacaagaatccctgaacagaggttctcagaacatataaaggatgagaagaatacagaatttcaacagaggttcattctcaagagagatgatgccagtatggaccgagatgataaccagactggccagaacggatatctaaatgacatcagggggaaccgtgaaggactgagccgcacctcaagcagccgccagagcagcacagacagcgaactcaaatccctggagccacgcccttggagcagcacagactctgatggctctgtccggagcatgcgaccccctgtcaccaaagctagcagcttcagtggaatctctatccttacccgaggtgacagcatcggcagcagtaaaggcggcagtgcgggaaggatctccaggccaggtatggcactaggtgccccagaagtgtgcaaccaggtcacctcatcccagtctgtccgggggcttctcccttgtactgcccagcagcaacagcagcagcagcagcagcaacttcctgctctcccacccacgcctcagcaacagccacccttgaataatcacatgatctcacaggcagatgacctcagcaacccctttggacaaatgagccttagtcgccaaggttctactgaagcagctgacccatctgcagctctattccagaccccacttatctcccagcaccctcagcagactagcttcatcatggcttccacgggtcagcccctccccacttccaactattccacctctagccatgcaccacctactcagcaagttctgccaccccaggggtacatgcagccccctcaacagatccaggtttcttactatccccctggacaatatcctaactccaaccagcaatatcgacctctctctcacccggtggcctatagcccccaacgtggtcagcagctgcctcagccatcccagcagcctggtttacagcccatgatgcctaaccagcagcaggcggcttaccaaggcatgattggggtccagcagccacagaaccagggcctgctcagcagccagaggagcagcatggggggccagatgcaaggcctggtggttcagtacactccactgccttcttaccaagttccagtgggtagtgactcgcaaaatgtggtccagccgcctttccagcaacccatgctggtccctgtgagccagtctgtgcaaggaggcctcccagcagcgggggtaccagtgtactatagcatgatcccacctgctcagcagaacggtacgagcccttctgtagggtttctgcaaccccctggctctgagcagtaccagatgcctcagtctccctctccctgcagtccaccacagatgccacagcagtactcaggagtgtcaccttctggaccaggtgtagtggtcatgcagctgaatgtccctaatggaccccagccccctcagaacccatccatggtccagtggagtcattgtaaatactacagcatggaccagcgggggcagaagcctggagacctgtacagtcctgacagcagcccccaggccaacacacaaatgagcagcagccctgtcacatctcctacccagtctccagcaccctctcctgtcaccagcctcagcagtgtctgcacaggactcagtcccctgcctgtcctcacacagttcccccggcctgggggtccagcacagggtgatgggcgctactcccttttgggccagccattacagtacaatctgtccatctgccctcccttgctccatggccagtcaacttacacggtgcaccagggacagagtggactgaagcatggaaaccggggcaagagacaagcactcaaatctgcctccactgacctggggacagcagatgttgtcctggggcgggtgctggaggtgacagatctccctgagggcatcacccgtactgaggcggacaaactcttcacgcagctcgccatgtctggcgccaagatccagtggctcaaggatgctcaggggctgcctggagggggtgggggggacaacagtgggactgctgagaatggccgccactcggacctcgctgccttgtacaccattgtggctgtgttccccagccccctggctgcccaaaatgcctcccttcgtctcaacaactccgtgagtcgcttcaaacttcgaatggccaaaaagaactatgacctgaggatcctggagcgagccagctcccaataaatggaggaggggaaagggactgtcacagaagaagcaagggcagggtggagggggttgaaggatcctgacagaccatggacagaggcaggaagtaaggaaactgatgttaaactggaacctaagacagtgatgaagatggaaacacagatacctacactggcattggactccttcttgctcccctgccatgggtcctctctttttccctggttgaccccccttgcatcactcttcttcccatcctcttctttttttttttttttttttttttgagacggagtttcgctcttgtcaccccagctggagtgcagtagcacgatcttggctaactgcaacctccagctcctgggttcaggtgattctcctgcctcagcctcccaagtagctggcactacagacacgcgccaccatgcccggctaatttttgtatttttagtagagacggagtttcaccatgttggccaggctggcctcaaactcctgacctcaggtgatccacctgccttggccttccagagtgctgggattacaggcgtgagccactgtgcctggcttccatcctcttctatcatttttttaaatctcttctcctatcataaaattaatttctcattttttggtcaggtagaattgggaaagtcccacactgtcctcctattaccttaacatcccaagcttcctttccttttttggtctttatgaatatatttatatggacagaattaagataaacaaaattgattgccccattctctcacttccccatcttgtcttcctagaccccacagagttaaaacttgggattcccctggcccccccagaacacttgtatattgtttgtttgaggttcgtgccgcagtaacagacacagtatttaattgcacatacagatgtttgctgggtatattcactgtaaattttatttaatctgtttttttgtttgtttgggggttatttggggggaggttggttttgtttttaaatataaaaaaaaaaatctgtcactgg

SEQ ID NO: 90 - protein, 958 aa, Homo sapiens
MSNSNTTQETLEIMKESEKKLVEESVNKNKFISKTPSKEEIEKECEDTSLRQETQRRTSNHGHARKRAKSNSKLKLVRSLAVCEESSTPFADGPLETQDIIQLHISCPSDKEEEKSTKDVSEKEDKDKNKEKIPRKMLSRDSSQEYTDSTGIDLHEFLVNTLKKNPRDRMMLLKLEQEILEFINDNNNQFKKFPQMTSYHRMLLHRVAAYFGMDHNVDQTGKAVIINKTSNTRIPEQRFSEHIKDEKNTEFQQRFILKRDDASMDRDDNQTGQNGYLNDIRGNREGLSRTSSSRQSSTDSELKSLEPRPWSSTDSDGSVRSMRPPVTKASSFSGISILTRGDSIGSSKGGSAGRISRPGMALGAPEVCNQVTSSQSVRGLLPCTAQQQQQQQQQQLPALPPTPQQQPPLNNHMISQADDLSNPFGQMSLSRQGSTEAADPSAALFQTPLISQHPQQTSFIMASTGQPLPTSNYSTSSHAPPTQQVLPPQGYMQPPQQIQVSYYPPGQYPNSNQQYRPLSHPVAYSPQRGQQLPQPSQQPGLQPMMPNQQQAAYQGMIGVQQPQNQGLLSSQRSSMGGQMQGLVVQYTPLPSYQVPVGSDSQNVVQPPFQQPMLVPVSQSVQGGLPAAGVPVYYSMIPPAQQNGTSPSVGFLQPPGSEQYQMPQSPSPCSPPQMPQQYSGVSPSGPGVVVMQLNVPNGPQPPQNPSMVQWSHCKYYSMDQRGQKPGDLYSPDSSPQANTQMSSSPVTSPTQSPAPSPVTSLSSVCTGLSPLPVLTQFPRPGGPAQGDGRYSLLGQPLQYNLSICPPLLHGQSTYTVHQGQSGLKHGNRGKRQALKSASTDLGTADVVLGRVLEVTDLPEGITRTEADKLFTQLAMSGAKIQWLKDAQGLPGGGGGDNSGTAENGRHSDLAALYTIVAVFPSPLAAQNASLRLNNSVSRFKLRMAKKNYDLRILERASSQ

SEQ ID NO: 91 - DNA, 4330 bp, Homo sapiens
  CDS (392)..(3322)
ggcttttcttccccttctgattttcccctccccccttttctccctttccgggtttggttccccccttttcttcccctctcccccctccttcccaagcccctttcccctcccccgtcccagtcccccctgcttcccagccctcggccccggggaagccccggccgagaaaagcccgcccccagaagcgcgccgccgccggccgtcggggccgagccgcagccgagcggccgtgggcccgggcggcgggcggagacgtgggcgccctccccgccaaggcccgtgcgagaggttagacttgtttcttatatgtgatgccattccagcactggactcatggaggctgagcatttattcaggagtccatagaggccactgtattctattgaagaacatgtctaacagtaacactactcaagagaccctggaaataatgaaagaatcagaaaaaaaactggtggaagaatctgtaaacaaaaacaagtttatatctaagactccaagtaaggaagaaattgagaaagaatgtgaagataccagtttgcgtcaggagacacagaggcggacatctaaccatggtcatgccaggaaaagagccaagtctaattccaagctaaagttggtgcgtagcctggcagtgtgtgaggagtcctccaccccatttgctgatgggccattagaaacccaggatataattcaattgcacatcagttgcccttctgacaaggaggaagaaaagtccacaaaagatgtctctgaaaaggaagacaaggacaaaaacaaagaaaagatcccaaggaagatgctgtccagagactccagccaggaatatacggactccactggaatagacctacatgaatttcttgtaaatacactgaaaaagaacccaagggacagaatgatgctgctaaaattagaacaggagattctggaatttattaatgacaacaataatcagttcaagaagttccctcagatgacctcatatcaccggatgctattacaccgggtagctgcctattttgggatggaccacaatgttgatcaaactgggaaagctgtcatcatcaacaaaactagtaacacaagaatccctgaacagaggttctcagaacatataaaggatgagaagaatacagaatttcaacagaggttcattctcaagagagatgatgccagtatggaccgagatgataaccagactggccagaacggatatctaaatgacatcagactctccaaagaagccttttcttctagctctcacaagagaaggcagatttttagggggaaccgtgaaggactgagccgcacctcaagcagccgccagagcagcacagacagcgaactcaaatccctggagccacgcccttggagcagcacagactctgatggctctgtccggagcatgcgaccccctgtcaccaaagctagcagcttcagtggaatctctatccttacccgaggtgacagcatcggcagcagtaaaggcggcagtgcgggaaggatctccaggccaggtatggcactaggtgccccagaagtgtgcaaccaggtcacctcatcccagtctgtccgggggcttctcccttgtactgcccagcagcaacagcagcagcagcagcagcaacttcctgctctcccacccacgcctcagcaacagccacccttgaataatcacatgatctcacaggcagatgacctcagcaacccctttggacaaatgagccttagtcgccaaggttctactgaagcagctgacccatctgcagctctattccagaccccacttatctcccagcaccctcagcagactagcttcatcatggcttccacgggtcagcccctccccacttccaactattccacctctagccatgcaccacctactcagcaagttctgccaccccaggggtacatgcagccccctcaacagatccaggtttcttactatccccctggacaatatcctaactccaaccagcaatatcgacctctctctcacccggtggcctatagcccccaacgtggtcagcagctgcctcagccatcccagcagcctggtttacagcccatgatgcctaaccagcagcaggcggcttaccaaggcatgattggggtccagcagccacagaaccagggcctgctcagcagccagaggagcagcatggggggccagatgcaaggcctggtggttcagtacactccactgccttcttaccaagttccagtgggtagtgactcgcaaaatgtggtccagccgcctttccagcaacccatgctggtccctgtgagccagtctgtgcaaggaggcctcccagcagcgggggtaccagtgtactatagcatgatcccacctgctcagcagaacggtacgagcccttctgtagggtttctgcaaccccctggctctgagcagtaccagatgcctcagtctccctctccctgcagtccaccacagatgccacagcagtactcaggagtgtcaccttctggaccaggtgtagtggtcatgcagctgaatgtccctaatggaccccagccccctcagaacccatccatggtccagtggagtcattgtaaatactacagcatggaccagcgggggcagaagcctggagacctgtacagtcctgacagcagcccccaggccaacacacaaatgagcagcagccctgtcacatctcctacccagtctccagcaccctctcctgtcaccagcctcagcagtgtctgcacaggactcagtcccctgcctgtcctcacacagttcccccggcctgggggtccagcacagggtgatgggcgctactcccttttgggccagccattacagtacaatctgtccatctgccctcccttgctccatggccagtcaacttacacggtgcaccagggacagagtggactgaagcatggaaaccggggcaagagacaagcactcaaatctgcctccactgacctggggacagcagatgttgtcctggggcgggtgctggaggtgacagatctccctgagggcatcacccgtactgaggcggacaaactcttcacgcagctcgccatgtctggcgccaagatccagtggctcaaggatgctcaggggctgcctggagggggtgggggggacaacagtgggactgctgagaatggccgccactcggacctcgctgccttgtacaccattgtggctgtgttccccagccccctggctgcccaaaatgcctcccttcgtctcaacaactccgtgagtcgcttcaaacttcgaatggccaaaaagaactatgacctgaggatcctggagcgagccagctcccaataaatggaggaggggaaagggactgtcacagaagaagcaagggcagggtggagggggttgaaggatcctgacagaccatggacagaggcaggaagtaaggaaactgatgttaaactggaacctaagacagtgatgaagatggaaacacagatacctacactggcattggactccttcttgctcccctgccatgggtcctctctttttccctggttgaccccccttgcatcactcttcttcccatcctcttctttttttttttttttttttttttgagacggagtttcgctcttgtcaccccagctggagtgcagtagcacgatcttggctaactgcaacctccagctcctgggttcaggtgattctcctgcctcagcctcccaagtagctggcactacagacacgcgccaccatgcccggctaatttttgtatttttagtagagacggagtttcaccatgttggccaggctggcctcaaactcctgacctcaggtgatccacctgccttggccttccagagtgctgggattacaggcgtgagccactgtgcctggcttccatcctcttctatcatttttttaaatctcttctcctatcataaaattaatttctcattttttggtcaggtagaattgggaaagtcccacactgtcctcctattaccttaacatcccaagcttcctttccttttttggtctttatgaatatatttatatggacagaattaagataaacaaaattgattgccccattctctcacttccccatcttgtcttcctagaccccacagagttaaaacttgggattcccctggcccccccagaacacttgtatattgtttgtttgaggttcgtgccgcagtaacagacacagtatttaattgcacatacagatgtttgctgggtatattcactgtaaattttatttaatctgtttttttgtttgtttgggggttatttggggggaggttggttttgtttttaaatataaaaaaaaaaatctgtcactgg

SEQ ID NO: 92 - protein, 976 aa, Homo sapiens
MSNSNTTQETLEIMKESEKKLVEESVNKNKFISKTPSKEEIEKECEDTSLRQETQRRTSNHGHARKRAKSNSKLKLVRSLAVCEESSTPFADGPLETQDIIQLHISCPSDKEEEKSTKDVSEKEDKDKNKEKIPRKMLSRDSSQEYTDSTGIDLHEFLVNTLKKNPRDRMMLLKLEQEILEFINDNNNQFKKFPQMTSYHRMLLHRVAAYFGMDHNVDQTGKAVIINKTSNTRIPEQRFSEHIKDEKNTEFQQRFILKRDDASMDRDDNQTGQNGYLNDIRLSKEAFSSSSHKRRQIFRGNREGLSRTSSSRQSSTDSELKSLEPRPWSSTDSDGSVRSMRPPVTKASSFSGISILTRGDSIGSSKGGSAGRISRPGMALGAPEVCNQVTSSQSVRGLLPCTAQQQQQQQQQQLPALPPTPQQQPPLNNHMISQADDLSNPFGQMSLSRQGSTEAADPSAALFQTPLISQHPQQTSFIMASTGQPLPTSNYSTSSHAPPTQQVLPPQGYMQPPQQIQVSYYPPGQYPNSNQQYRPLSHPVAYSPQRGQQLPQPSQQPGLQPMMPNQQQAAYQGMIGVQQPQNQGLLSSQRSSMGGQMQGLVVQYTPLPSYQVPVGSDSQNVVQPPFQQPMLVPVSQSVQGGLPAAGVPVYYSMIPPAQQNGTSPSVGFLQPPGSEQYQMPQSPSPCSPPQMPQQYSGVSPSGPGVVVMQLNVPNGPQPPQNPSMVQWSHCKYYSMDQRGQKPGDLYSPDSSPQANTQMSSSPVTSPTQSPAPSPVTSLSSVCTGLSPLPVLTQFPRPGGPAQGDGRYSLLGQPLQYNLSICPPLLHGQSTYTVHQGQSGLKHGNRGKRQALKSASTDLGTADVVLGRVLEVTDLPEGITRTEADKLFTQLAMSGAKIQWLKDAQGLPGGGGGDNSGTAENGRHSDLAALYTIVAVFPSPLAAQNASLRLNNSVSRFKLRMAKKNYDLRILERASSQ

SEQ ID NO: 93 - protein, 299 aa, Homo sapiens
MVDKKLVVVFGGTGAQGGSVARTLLEDGTFKVRVVTRNPRKKAAKELRLQGAEVVQGDQDDQVIMELALNGAYATFIVTNYWESCSQEQEVKQGKLLADLARRLGLHYVVYSGLENIKKLTAGRLAAAHFDGKGEVEEYFRDIGVPMTSVRLPCYFENLLSHFLPQKAPDGKSYLLSLPTGDVPMDGMSVSDLGPVVLSLLKMPEKYVGQNIGLSTCRHTAEEYAALLTKHTRKVVHDAKMTPEDYEKLGFPGARDLANMFRFYALRPDRDIELTLRLNPKALTLDQWLEQHKGDFNLL

SEQ ID NO: 94 - protein, 116 aa, Homo sapiens [sequence omitted]

SEQ ID NO: 95 - protein, 78 aa, Homo sapiens
MRASLILIREILWEMILKVLIEGLQLPIHVFREPLRFHKRSLQSFVLVQNPSGKFQFLRPLRKLIQMPKKDRIEVQIT

SEQ ID NO: 96 - protein, 828 aa, Homo sapiens
MRNGKTECYLSIQTQENFPANLNELVNCIVISSLVTTQRKLKAMSLLGSRNQLARAVLNPNPMDFCTKDLLTTTSERIIAYLRDFNEDQKKAIETAYAMVKHSPSVAKICLIHGPPGTGKSKTIVGLLYRLLTENQRKGHSDENSNAKIKQNRVLVCAPSNAAVDELMKKIILEFKEKCKDKKNPLGNCGDINLVRLGPEKSINSEVLKFSLDSQVNHRMKKELPSHVQAMHKRKEFLDYQLDELSRQRALCRGGREIQRQELDENISKVSKERQELASKIKEVQGRPQKTQSIIILESHIICCTLSTSGGLLLESAFRGQGGVPFSCVIVDEAGQSCEIETLTPLIHRCNKLILVGDPKQLPPTVISMKAQEYGYDQSMMARFCRLLEENVEHNMISRLPILQLTVQYRMHPDICLFPSNYVYNRNLKTNRQTEAIRCSSDWPFQPYLVFDVGDGSERRDNDSYINVQEIKLVMEIIKLIKDKRKDVSFRNIGIITHYKAQKTMIQKDLDKEFDRKGPAEVDTVDAFQGRQKDCVIVTCVRANSIQGSIGFLASLQRLNVTITRAKYSLFILGHLRTLMENQHWNQLIQDAQKRGAIIKTCDKNYRHDAVKILKLKPVLQRSLTHPPTIAPEGSRPQGGLPSSKLDSGFAKTSVAASLYHTPSDSKEITLTVTSKDPERPPVHDQLQDPRLLKRMGIEVKGGIFLWDPQPSSPQHPGATPPTGEPGFPVVHQDLSHIQQPAAVVAALSSHKPPVRGEPPAASPEASTCQSKCDDPEEELCHRREARAFSEGEQEKCGSETHHTRRNSRWDKRTLEQEDSSSKKRKLL

SEQ ID NO: 97 - protein, 237 aa, Homo sapiens
MLCKQTWPHWKGPARSGVEVLFNELEIPVEEYSFGRSKIFIRNPRTLFKLEDLRKQRLEDLATLIQKIYRGWKCRTHFLLMKKSQIVIAAWYRRYAQQKRYQQTKSSALVIQSYIRGWKARKILRELKHQKRCKEAVTTIAAYWHGTQVRREYRKFFRANAGKKIYEFTLQRIVQKYFLEMKNKMPSLSPIDKNWPSRPYLFLDSTHKELKRIFHLWRVKNTGTNSQTSRNLFMKRN

SEQ ID NO: 98 - protein, 811 aa, Homo sapiens
MNKVEQKSQESVSFKDVTVGFTQEEWQHLDPSQRALYRDVMLENYSNLVSVGYCVHKPEVIFRLQQGEEPWKQEEEFPSQSFPEVWTADHLKERSQENQSKHLWEVVFINNEMLTKEQGDVIGIPFNVDVSSFPSRKMFCQCDSCGMSFNTVSELVISKINYLGKKSDEFNACGKLLLNIKHDETHTQEKNEVLKNRNTLSHHEETLQHEKIQTLEHNFEYSICQETLLEKAVFNTQKRENAEENNCDYNEFGRTLCDSSSLLFHQISPSRDNHYEFSDCEKFLCVKSTLSKPHGVSMKHYDCGESGNNFRRKLCLSHLQKGDKGEKHFECNECGKAFWEKSHLTRHQRVHTGQKPFQCNECEKAFWDKSNLTKHQRSHTGEKPFECNECGKAFSHKSALTLHQRTHTGEKPYQCNACGKTFCQKSDLTKHQRTHTGLKPYECYECGKSFRVTSHLKVHQRTHTGEKPFECLECGKSFSEKSNLTQHQRIHIGDKSYECNACGKTFYHKSLLTRHQIIHTGWKPYECYECGKTFCLKSDLTVHQRTHTGQKPFACPECGKFFSHKSTLSQHYRTHTGEKPYECHECGKIFYNKSYLTKHNRTHTGEKPYECNECGKAFYQKSQLTQHQRIHIGEKPYKCNECGKAFCHKSALIVHQRTHTQEKPYKCNECGKSFCVKSGLIFHERKHTGEKPYECNECGKFFRHKSSLTVHHRAHTGEKSCQCNECGKIFYRKSELAQHQRSHTGEKPYECNTCRKTFSQKSNLIVHQRRHIGENLMNEMDIRNFQPQVSLHNASEYSHCGESPDDILNVQ

SEQ ID NO: 99 - protein, 558 aa, Homo sapiens
MAIPGRQYGLILPKKTQQLHPVLQKPSVFGNDSDDDDETSVSESLQREAAKKQAMKQTKLEIQKALAEDATVYEYDSIYDEMQKKKEENNPKLLLGKDRKPKYIHNLLKAVEIRKKEQEKRMEKKIQREREMEKGEFDDKEAFVTSAYKKKLQERAEEEEREKRAAALEACLDVTKQKDLSGFYRHLLNQAVGEEEVPKCSFREARSGIKEEKSRGFSNEVSSKNRIPQEKCILQTDVKVEENPDADSDFDAKSSADDEIEETRVNCRREKVIETPENDFKHHRSQNHSRSPSEERGHSTRHHTKGSRTSRGHEKREDQHQQKQSRDQENHYTDRDYRKERDSHRHREASHRDSHWKRHEQEDKPRARDQRERSDRVWKREKDREKYSQREQERDRQQNDQNRPSEKGEKEEKSKAKEEHMKVRKERYENNDKYRDREKREVGVQSSERNQDRKESSPNSRAKDKFLDQERSNKMRNMAKDKERNQEKPSNSESSLGAKHRLTEEGQEKGKEQERPPEAVSKFAKRNNEETVMSARDRYLARQMARVNAKTYIEKEDD

SEQ ID NO: 100 - protein, 366 aa, Homo sapiens
MLLLRCQLKQAPPQKVSFRFCVVMGKQQSKLKHSTYKYGPDEIIEERIQTKAFQEYSPAHMDTVSVVAALNSDLCVSGGKDKTVVAYNWKTGNVVKRFKGHEHEITKVACIPKSSQFFSASRDRMVMMWDLHGSSQPRQQLCGHAMVVTGLAVSPDSSQLCTGSRDNTLLLWDVVTGQSVERASVSRNVVTHLCWVPREPYILQTSEDKTLRLWDSRGLQVAHMFPAKQHIQTYCEVSVDGHKCISCSNGFGGEGCEATLWDLRQTRNRICEYKGHFQTVASCVFLPRALALMPLIATSSHDCKVKIWNQDTGACLFTLSLDGSGPLTSLAVGDAISLLCASFNRGIHLLRMDHSQGLELQEVAAF

SEQ ID NO: 101 - protein, 687 aa, Homo sapiens
MFGKLMTIAKNLPDPGKAQDFVKKFNQVLGDDEKLRSQLELLISPTCSCKQADICVREIARKLANPKQPTNPFLEMVKFLLERIAPVHIDSEAISALVKLMNKSIEGTADDEEEGVSPDTAIRSGLELLKVLSFTHPTSFHSAETYESLLQCLRMEDDKVAEAAIQIFRNTGHKIETDLPQIRSTLIPILHQKAKRGTPHQAKQAVHCIHAIFTNKEVQLAQIFEPLSRSLNADVPEQLITPLVSLGHISMLAPDQFASPMKSVVANFIVKDLLMNDRSTGEKNGKLWSPDEEVSPEVLAKVQAIKLLVRWLLGMKNNQSKSANSTLRLLSAMLVSEGDLTEQKRISKSDMSRLRLAAGSAIMKLAQEPCYHEIITPEQFQLCALVINDECYQVRQIFAQKLHKALVKLLLPLEYMAIFALCAKDPVKERRAHARQCLLKNISIRREYIKQNPMATEKLLSLLPEYVVPYMIHLLAHDPDFTRSQDVDQLRDIKECLWFMLEVLMTKNENNSHAFMKKMAENIKLTRDAQSPDESKTNEKLYTVCDVALCVINSKSALCNADSPKDPVLPMKFFTQPEKDFCNDKSYISEETRVLLLTGKPKPAGVLGAVNKPLSATGRKPYVRSTGTETGSNINVNSELNPSTGNRSREQSSEAAETGVSENEENPVRIISVTPVKNIDPVKNKGN

SEQ ID NO: 102 - protein, 653 aa, Homo sapiens
MAAAAASHLNLDALREVLECPICMESITEEQLRPKLLHCGHTICRQCLEKLLASSINGVRCPFCSKITRITSLTQLTDNLTVLKIIDTAGLSEAVGLLMCRSCGRRLPRQFCRSCGLVLCEPCREADHQPPGHCTLPVKEAAEERRRDFGEKLTRLRELMGELQRRKAALEGVSKDLQARYKAVLQEYGHEERRVQDELARSRKFFTGSLAEVEKSNSQVVEEQSYLLNIAEVQAVSRCDYFLAKIKQADVALLEETADEEEPELTASLPRELTLQDVELLKVGHVGPLQIGQAVKKPRTVNVEDSWAMEATASAASTSVTFREMDMSPEEVVASPRASPAKQRGPEAASNIQQCLFLKKMGAKGSTPGMFNLPVSLYVTSQGEVLVADRGNYRIQVFTRKGFLKEIRRSPSGIDSFVLSFLGADLPNLTPLSVAMNCQGLIGVTDSYDNSLKVYTLDGHCVACHRSQLSKPWGITALPSGQFVVTDVEGGKLWCFTVDRGSGVVKYSCLCSAVRPKFVTCDAEGTVYFTQGLGLNLENRQNEHHLEGGFSIGSVGPDGQLGRQISHFFSENEDFRCIAGMCVDARGDLIVADSSRKEILHFPKGGGYSVLIREGLTCPVGIALTPKGQLLVLDCWDHCIKIYSYHLRRYSTP

SEQ ID NO: 103 - protein, 138 aa, Homo sapiens
MATRRLGVGETLGALNAALGPGGPVWTKETRTRHLRSRDFLAPHRALQARFDDGQVPEHLLHALACLQGPGVAPVLRCAPTPAGLSLQLQRSAVFERVLSAVAAYATPASPASLGQRVLLHCPALRSSPCALTGCACA

SEQ ID NO: 104 - protein, 2355 aa, Homo sapiens
MLRGPGPGLLLLAVQCLGTAVPSTGASKSKRQAQQMVQPQSPVAVSQSKPGCYDNGKHYQINQQWERTYLGNALVCTCYGGSRGFNCESKPEAEETCFDKYTGNTYRVGDTYERPKDSMIWDCTCIGAGRGRISCTIANRCHEGGQSYKIGDTWRRPHETGGYMLECVCLGNGKGEWTCKPIAEKCFDHAAGTSYVVGETWEKPYQGWMMVDCTCLGEGSGRITCTSRNRCNDQDTRTSYRIGDTWSKKDNRGNLLQCICTGNGRGEWKCERHTSVQTTSSGSGPFTDVRAAVYQPQPHPQPPPYGHCVTDSGVVYSVGMQWLKTQGNKQMLCTCLGNGVSCQETAVTQTYGGNSNGEPCVLPFTYNGRTFYSCTTEGRQDGHLWCSTTSNYEQDQKYSFCTDHTVLVQTRGGNSNGALCHFPFLYNNHNYTDCTSEGRRDNMKWCGTTQNYDADQKFGFCPMAAHEEICTTNEGVMYRIGDQWDKQHDMGHMMRCTCVGNGRGEWTCIAYSQLRDQCIVDDITYNVNDTFHKRHEEGHMLNCTCFGQGRGRWKCDPVDQCQDSETGTFYQIGDSWEKYVHGVRYQCYCYGRGIGEWHCQPLQTYPSSSGPVEVFITETPSQPNSHPIQWNAPQPSHISKYILRWRPKNSVGRWKEATIPGHLNSYTIKGLKPGVVYEGQLISIQQYGHQEVTRFDFTTTSTSTPVTSNTVTGETTPFSPLVATSESVTEITASSFVVSWVSASDTVSGFRVEYELSEEGDEPQYLDLPSTATSVNIPDLLPGRKYIVNVYQISEDGEQSLILSTSQTTAPDAPPDPTVDQVDDTSIVVRWSRPQAPITGYRIVYSPSVEGSSTELNLPETANSVTLSDLQPGVQYNITIYAVEENQESTPVVIQQETTGTPRSDTVPSPRDLQFVEVTDVKVTIMWTPPESAVTGYRVDVIPVNLPGEHGQRLPISRNTFAEVTGLSPGVTYYFKVFAVSHGRESKPLTAQQTTKLDAPTNLQFVNETDSTVLVRWTPPRAQITGYRLTVGLTRRGQPRQYNVGPSVSKYPLRNLQPASEYTVSLVAIKGNQESPKATGVFTTLQPGSSIPPYNTEVTETTIVITWTPAPRIGFKLGVRPSQGGEAPREVTSDSGSIVVSGLTPGVEYVYTIQVLRDGQERDAPIVNKVVTPLSPPTNLHLEANPDTGVLTVSWERSTTPDITGYRITTTPTNGQQGNSLEEVVHADQSSCTFDNLSPGLEYNVSVYTVKDDKESVPISDTIIPAVPPPTDLRFTNIGPDTMRVTWAPPPSIDLTNFLVRYSPVKNEEDVAELSISPSDNAVVLTNLLPGTEYVVSVSSVYEQHESTPLRGRQKTGLDSPTGIDFSDITANSFTVHWIAPRATITGYRIRHHPEHFSGRPREDRVPHSRNSITLTNLTPGTEYVVSIVALNGREESPLLIGQQSTVSDVPRDLEVVAATPTSLLISWDAPAVTVRYYRITYGETGGNSPVQEFTVPGSKSTATISGLKPGVDYTITVYAVTGRGDSPASSKPISINYRTEIDKPSQMQVTDVQDNSISVKWLPSSSPVTGYRVTTTPKNGPGPTKTKTAGPDQTEMTIEGLQPTVEYVVSVYAQNPSGESQPLVQTAVTNIDRPKGLAFTDVDVDSIKIAWESPQGQVSRYRVTYSSPEDGIHELFPAPDGEEDTAELQGLRPGSEYTVSVVALHDDMESQPLIGTQSTAIPAPTDLKFTQVTPTSLSAQWTPPNVQLTGYRVRVTPKEKTGPMKEINLAPDSSSVVVSGLMVATKYEVSVYALKDTLTSRPAQGVVTTLENVSPPRRARVTDATETTITISWRTKTETITGFQVDAVPANGQTPIQRTIKPDVRSYTITGLQPGTDYKIYLYTLNDNARSSPVVIDASTAIDAPSNLRFLATTPNSLLVSWQPPRARITGYIIKYEKPGSPPREVVPRPRPGVTEATITGLEPGTEYTIYVIALKNNQKSEPLIGRKKTDELPQLVTLPHPNLHGPEILDVPSTVQKTPFVTHPGYDTGNGIQLPGTSGQQPSVGQQMIFEEHGFRRTTPPTTATPIRHRPRPYPPNVGQEALSQTTISWAPFQDTSEYIISCHPVGTDEEPLQFRVPGTSTSATLTGLTRGATYNIIVEALKDQQRHKVREEVVTVGNSVNEGLNQPTDDSCFDPYTVSHYAVGDEWERMSESGFKLLCQCLGFGSGHFRCDSSRWCHDNGVNYKIGEKWDRQGENGQMMSCTCLGNGKGEFKCDPHEATCYDDGKTYHVGEQWQKEYLGAICSCTCFGGQRGWRCDNCRRPGGEPSPEGTTGQSYNQYSQRYHQRTNTNVNCPIECFMPLDVQADREDSRE

SEQ ID NO: 105 - protein, 596 aa, Homo sapiens
MSLSMRDPVIPGTSMAYHPFLPHRAPDFAMSAVLGHQPPFFPALTLPPNGAAALSLPGALAKPIMDQLVGAAETGIPFSSLGPQAHLRPLKTMEPEEEVEDDPKVHLEAKELWDQFHKRGTEMVITKSGRRMFPPFKVRCSGLDKKAKYILLMDIIAADDCRYKFHNSRWMVAGKADPEMPKRMYIHPDSPATGEQWMSKVVTFHKLKLTNNISDKHGFTLAFPSDHATWQGNYSFGTQTILNSMHKYQPRFHIVRANDILKLPYSTFRTYLFPETEFIAVTAYQNDKITQLKIDNNPFAKGFRDTGNGRREKRKQLTLQSMRVFDERHKKENGTSDESSSEQAAFNCFAQASSPAASTVGTSNLKDLCPSEGESDAEAESKEEHGPEACDAAKISTTTSEEPCRDKGSPAVKAHLFAAERPRDSGRLDKASPDSRHSPATISSSTRGLGAEERRSPVREGTAPAKVEEARALPGKEAFAPLTVQTDAARSSVHRHPFLNLNTMRPRLRYSPYSIPVPVPDGSSLLTTALAASPASVAVDSGSELNSRSSTLSSSSMSLSPKLCAEKEAATSELQSIQRLVSGLEAKPDRSRSASP

SEQ ID NO: 106 - protein, 1298 aa, Homo sapiens
MVTGAGVVLGDNDAPPGTSASQEGDGSVNDGTEGESAVTSTGITEDGEGPASCTGSEDSSEGFAISSESEENGESAMDSTVAKEGTNVPLVAAGPCDDEGIVTSTGAKEEDEEGEDVVTSTGRGNEIGHASTCTGLGEESEGVLICESAEGDSQIGTVVEHVEAEAGAAIMNANENNVDSMSGTEKGSKDTDICSSAKGIVESSVTSAVSGKDEVTPVPGGCEGPMTSAASDQSDSQLEKVEDTTISTGLVGGSYDVLVSGEVPECEVAHTSPSEKEDEDIITSVENEECDGLMATTASGDITNQNSLAGGKNQGKVLIISTSTTNDYTPQVSAITDVEGGLSDALRTEENMEGTRVTTEEFEAPMPSAVSGDDSQLTASRSEEKDECAMISTSIGEEFELPISSATTIKCAESLQPVAAAVEERATGPVLISTADFEGPMPSAPPEAESPLASTSKEEKDECALISTSIAEECEASVSGVVVESENERAGTVMEEKDGSGIISTSSVEDCEGPVSSAVPQEEGDPSVTPAEEMGDTAMISTSTSEGCEAVMIGAVLQDEDRLTITRVEDLSDAAIISTSTAECMPISASIDRHEENQLTADNPEGNGDLSATEVSKHKVPMPSLIAENNCRCPGPVRGGKEPGPVLAVSTEEGHNGPSVHKPSAGQGHPSAVCAEKEEKHGKECPEIGPFAGRGQKESTLHLINAEEKNVLLNSLQKEDKSPETGTAGGSSTASYSAGRGLEGNANSPAHLRGPEQTSGQTAKDPSVSIRYLAAVNTGAIKADDMPPVQGTVAEHSFLPAEQQGSEDNLKTSTTKCITGQESKIAPSHTMIPPATYSVALLAPKCEQDLTIKNDYSGKWTDQASAEKTGDDNSTRKSFPEEGDIMVTVSSEENVCDIGNEESPLNVLGGLKLKANLKMEAYVPSEEEKNGEILAPPESLCGGKPSGIAELQREPLLVNESLNVENSGFRTNEEIHSESYNKGEISSGRKDNAEAISGHSVEADPKEVEEEERHMPKRKRKQHYLSSEDEPDDNPDVLDSRIETAQRQCPETEPHDTKEENSRDLEELPKTSSETNSTTSRVMEEKDEYSSSETTGEKPEQNDDDTIKSQEEDQPIIIKRKRGRPRKYPVETTLKMKDDSKTDTGIVTVEQSPSSSKLKVMQTDESNKETANLQERSISNDDGEEKIVTSVRRRGRKPKRSLTVSDDAESSEPERKRQKSVSDPVEDKKEQESDEEEEEEEEDEPSGATTRSTTRSEAQRSKTQLSPSIKRKREVSPPGARTRGQQRVEEAPVKKAKR

SEQ ID NO: 107 - protein, 298 aa, Homo sapiens [sequence omitted]

SEQ ID NO: 108 - protein, 784 aa, Homo sapiens
MVGKHLGARKDHPGLKAKENDENCGPTTTVFVGNISEKASDMLIRQLLAKCGLVLSWKRVQGASGKLQAFGFCEYKEPESTLRALRLLHDLQIGEKKLLVKVDAKTKAQLDEWKAKKKASNGNARPETVTNDDEEALDEETKRRDQMIKGAIEVLIREYSSELNAPSQESDSHPRKKKKEKKEDIFRRFPVAPLIPYPLITKEDINAIEMEEDKRDLISREISKFRDTHKKLEEEKGKKEKERQEIEKERRERERERERERERREREREREREREREKEKERERERERDRDRDRTKERDRDRDRERDRDRDRERSSDRNKDRSRSREKSRDREREREREREREREREREREREREREREREREREREKDKKRDREEDEEDAYERRKLERKLREKEAAYQERLKNWEIRERKKTREYEKEAEREEERRREMAKEAKRLKEFLEDYDDDRDDPKYYRGSALQKRLRDREKEMEADERDRKREKEELEEIRQRLLAEGHPDPDAELQRMEQEAERRRQPQIKQEPESEEEEEEKQEKEEKREEPMEEEEEPEQKPCLKPTLRPISSAPSVSSASGNATPNTPGDESPCGIIIPHENSPDQQQPEEHRPKIGLSLKLGASNSPGQPNSVKRKKLPVDSVFNKFEDEDSDDVPRKRKLVPLDYGEDDKNATKGTVNTEEKRKHIKSLIEKIPTAKPELFAYPLDWSIVDSILMERRIRPWINKKIIEYIGEEEATLVDFVCSKVMAHSSPQSILDDVAMVLDEEAEVFIVKMWRLLIYETEAKKIGLVK

SEQ ID NO: 109 - protein, 735 aa, Homo sapiens
KCGLVLSWKRVQGASGKLQAFGFCEYKEPESTLRALRLLHDLQIGEKKLLVKVDAKTKAQLDEWKAKKKASNGNARPETVTNDDEEALDEETKRRDQMIKGAIEVLIREYSSELNAPSQESDSHPRKKKKEKKEDIFRRFPVAPLIPYPLITKEDINAIEMEEDKRDLISREISKFRDTHKKLEEEKGKKEKERQEIEKERRERERERERERERREREREREREREREKEKERERERERDRDRDRTKERDRDRDRERDRDRDRERSSDRNKDRSRSREKSRDREREREREREREREREREREREREREREREREREREKDKKRDREEDEEDAYERRKLERKLREKEAAYQERLKNWEIRERKKTREYEKEAEREEERRREMAKEAKRLKEFLEDYDDDRDDPKYYRGSALQKRLRDREKEMEADERDRKREKEELEEIRQRLLAEGHPDPDAELQRMEQEAERRRQPQIKQEPESEEEEEEKQEKEEKREEPMEEEEEPEQKPCLKPTLRPISSAPSVSSASGNATPNTPGDESPCGIIIPHENSPDQQQPEEHRPKIGLSLKLGASNSPGQPNSVKRKKLPVDSVFNKFEDEDSDDVPRKRKLVPLDYGEDDKNATKGTVNTEEKRKHIKSLIEKIPTAKPELFAYPLDWSIVDSILMERRIRPWINKKIIEYIGEEEATLVDFVCSKVMAHSSPQSILDDVAMVLDEEAEVFIVKMWRLLIYETEAKKIGLVK

SEQ ID NO: 110 - protein, 556 aa, Homo sapiens
METESGNQEKVMEEESTEKKKEVEKKKRSRVKQVLADIAKQVDFWFGDANLHKDRFLREQIEKSRDGYVDISLLVSFNKMKKLTTDGKLIARALRSSAVVELDLEGTRIRRKKPLGERPKDEDERTVYVELLPKNVNHSWIERVFGKCGNVVYISIPHYKSTGDPKGFAFVEFETKEQAAKAIEFLNNPPEEAPRKPGIFPKTVKNKPIPALRVVEEKKKKKKKKGRMKKEDNIQAKEENMDTSNTSISKMKRSRPTSEGSDIESTEPQKQCSKKKKKRDRVEASSLPEVRTGKRKRSSSEDAESLAPRSKVKKIIQKDIIKEASEASKENRDIEISTEEEKDTGDLKDSSLLKTKRKHKKKHKERHKMGEEVIPLRVLSKSEWMDLKKEYLALQKASMASLKKTISQIKSESEMETDSGVPQNTGMKNEKTANREECRTQEKVNATGPQFVSGVIVKIISTEPLPGRKQVRDTLAAISEVLYVDLLEGDTECHARFKTPEDAQAVINAYTEINKKHCWKLEILSGDHEQGIGRRFWLIDRQNLISLGKRKEALKS

SEQ ID NO: 111 - protein, 214 aa, Homo sapiens
MGEEVIPLRVLSKSEWMDLKKEYLALQKASMASLKKTISQIKSESEMETDSGVPQNTGMKNEKTANREECRTQEKVNATGPQFVSGVIVKIISTEPLPGRKQVRDTLAAISEVLYVDLLEGDTECHARFKTPEDAQAVINAYTEINKEHCWKLEILSGDHEQRYWQKILVDRQAKLNQPREKKRGTEKLITKAEKIRLAKTQQASKHIRFSEYD

SEQ ID NO: 112 - protein, 708 aa, Homo sapiens [sequence omitted]

SEQ ID NO: 113 - protein, 1688 aa, Homo sapiens
MTQSTVPLNLIRVHLMVAVEGHLFQKSFQASPNLAYTFIWDKTDAYGQRVYGLSDAVVSVGFEYETCPSLILWEKRTALLQGFELDPSNLGGWSLDKHHILNVKSGILHKGTGENQFLTQQPAIITSIMGNGRRRSISCPSCNGLAEGNKLLAPVALAVGIDGSLYVGDFNYIRRIFPSRNVTSILELRNKEFKHSNNPAHKYYLAVDPVSGSLYVSDTNSRRIYRVKSLSGTKDLAGNSEVVAGTGEQCLPFDEARCGDGGKAIDATLMSPRGIAVDKNGLMYFVDATMIRKVDQNGIISTLLGSNDLTAVRPLSCDSSMDVAQVRLEWPTDLAVNPMDNSLYVLENNVILRITENHQVSIIAGRPMHCQVPGIDYSLSKLAIHSALESASAIAISHTGVLYITETDEKKINRLRQVTTNGEICLLAGAASDCDCKNDVNCNCYSGDDAYATDAILNSPSSLAVAPDGTIYIADLGNIRIRAVSKNKPVLNAFNQYEAASPGEQELYVFNADGIHQYTVSLVTGEYLYNFTYSTDNDVTELIDNNGNSLKIRRDSSGMPRHLLMPDNQIITLTVGTNGGLKVVSTQNLELGLMTYDGNTGLLATKSDETGWTTFYDYDHEGRLTNVTRPTGVVTSLHREMEKSITIDIENSNRDDDVTVITNLSSVEASYTVVQDQVRNSYQLCNNGTLRVMYANGMGISFHSEPHVLAGTITPTIGRCNISLPMENGLNSIEWRLRKEQIKGKVTIFGRKLRVHGRNLLSIDYDRNIRTEKIYDDHRKFTLRIIYDQVGRPFLWLPSSGLAAVNVSYFFNGRLAGLQRGAMSERTDIDKQGRIVSRMFADGKVWSYSYLDKSMVLLLQSQRQYIFEYDSSDRLLAVTMPSVARHSMSTHTSIGYIRNIYNPPESNASVIFDYSDDGRILKTSFLGTGRQVFYKYGKLSKLSEIVYDSTAVTFGYDETTGVLKMVNLQSGGFSCTIRYRKIGPLVDKQIYRFSEEGMVNARFDYTYHDNSFRIASIKPVISETPLPVDLYRYDEISGKVEHFGKFGVIYYDINQIITTAVMTLSKHFDTHGRIKEVQYEMFRSLMYWMTVQYDSMGRVIKRELKLGPYANTTKYTYDYDGDGQLQSVAVNDRPTWRYSYDLNGNLHLLNPGNSVRLMPLRYDLRDRITRLGDVQYKIDDDGYLCQRGSDIFEYNSKGLLTRAYNKASGWSVQYRYDGVGRRASYKTNLGHHLQYFYSDLHNPTRITHVYNHSNSEITSLYYDLQGHLFAMESSSGEEYYVASDNTGTPLAVFSINGLMIKQLQYTAYGEIYYDSNPDFQMVIGFHGGLYDPLTKLVHFTQRDYDVLAGRWTSPDYTMWKNVGKEPAPFNLYMFKSNNPLSSELDLKNYVTDVKSWLVMFGFQLSNIIPGFPRAKMYFVPPPYELSESQASENGQLITGVQQTTERHNQAFMALEGQVITKKLHASIREKAGHWFATTTPIIGKGIMFAIKEGRVTTGVSSIASEDSRKVASVLNNAYYLDKMHYSIEGKDTHYFVKIGSADGDLVTLGTTIGRKVLESGVNVTVSQPTLLVNGRTRRFTNIEFQYSTLLLSIRYGLTPDTLDEEKARVLDQARQRALGTAWAKEQQKARDGREGSRLWTEGEKQQLLSTGRVQGYEGYYVLPVEQYPELADSSSNIQFLRQNEMGKR

SEQ ID NO: 114 - protein, 1871 aa, Homo sapiens
MANLEESFPRGGTRKIHKPEKAFQQSVEQDNLFDISTEEGSTKRKKSQKGPAKTKKLKIEKRESSKSAREKFEILSVESLCEGMRILGCVKEVNELELVISLPNGLQGFVQVTEICDAYTKKLNEQVTQEQPLKDLLHLPELFSPGMLVRCVVSSLGITDRGKKSVKLSLNPKNVNRVLSAEALKPGMLLTGTVSSLEDHGYLVDIGVDGTRAFLPLLKAQEYIRQKNKGAKLKVGQYLNCIVEKVKGNGGVVSLSVGHSEVSTAIATEQQSWNLNNLLPGLVVKAQVQKVTPFGLTLNFLTFFTGVVDFMHLDPKKAGTYFSNQAVRACILCVHPRTRVVHLSLRPIFLQPGRPLTRLSCQNLGAVLDDVPVQGFFKKAGATFRLKDGVLAYARLSHLSDSKNVFNPEAFKPGNTHKCRIIDYSQMDELALLSLRTSIIEAQYLRYHDIEPGAVVKGTVLTIKSYGMLVKVGEQMRGLVPPMHLADILMKNPEKKYHIGDEVKCRVLLCDPEAKKLMMTLKKTLIESKLPVITCYADAKPGLQTHGFIIRVKDYGCIVKFYNNVQGLVPKHELSTEYIPDPERVFYTGQVVKVVVLNCEPSKERMLLSFKLSSDPEPKKEPAGHSQKKGKAINIGQLVDVKVLEKTKDGLEVAVLPHNIRAFLPTSHLSDHVANGPLLHHWLQAGDILHRVLCLSQSEGRVLLCRKPALVSTVEGGQDPKNFSEIHPGMLLIGFVKSIKDYGVFIQFPSGLSGLAPKAIMSDKFVTSTSDHFVEGQTVAAKVTNVDEEKQRMLLSLRLSDCGLGDLAITSLLLLNQCLEELQGVRSLMSNRDSVLIQTLAEMTPGMFLDLVVQEVLEDGSVVFSGGPVPDLVLKASRYHRAGQEVESGQKKKVVILNVDLLKLEVHVSLHQDLVNRKARKLRKGSEHQAIVQHLEKSFAIASLVETGHLAAFSLTSHLNDTFRFDSEKLQVGQGVSLTLKTTEPGVTGLLLAVEGPAAKRTMRPTQKDSETVDEDEEVDPALTVGTIKKHTLSIGDMVTGTVKSIKPTHVVVTLEDGIIGCIHASHILDDVPEGTSPTTKLKVGKTVTARVIGGRDMKTFKYLPISHPRFVRTIPELSVRPSELEDGHTALNTHSVSPMEKIKQYQAGQTVTCFLKKYNVVKKWLEVEIAPDIRGRIPLLLTSLSFKVLKHPDKKFRVGQALRATVVGPDSSKTLLCLSLTGPHKLEEGEVAMGRVVKVTPNEGLTVSFPFGKIGTVSIFHMSDSYSETPLEDFVPQKVVRCYILSTADNVLTLSLRSSRTNPETKSKVEDPEINSIQDIKEGQLLRGYVGSIQPHGVFFRLGPSVVGLARYSHVSQHSPSKKALYNKHLPEGKLLTARVLRLNHQKNLVELSFLPGDTGKPDVLSASLEGQLTKQEERKTEAEERDQKGEKKNQKRNEKKNQKGQEEVEMPSKEKQQPQKPQAQKRGGRECRESGSEQERVSKKPKKAGLSEEDDSLVDVYYREGKEEAEETNVLPKEKQTKPAEAPRLQLSSGFAWNVGLDSLTPALPPLAESSDSEEDEKPHQATIKKSKKERELEKQKAEKELSRIEEALMDPGRQPESADDFDRLVLSSPNSSILWLQYMAFHLQATEIEKARAVAERALKTISFREEQEKLNVWVALLNLENMYGSQESLTKVFERAVQYNEPLKVFLHLADIYAKSEKFQEAGELYNRMLKRFRQEKAVWIKYGAFLLRRSQAAASHRVLQRALECLPSKEHVDVIAKFAQLEFQLGDAERAKAIFENTLSTYPKRTDVWSVYIDMTIKHGSQKDVRDIFERVIHLSLAPKRMKFFFKRYLDYEKQHGTEKDVQAVKAKALEYVEAKSSVLED

SEQ ID NO: 115 - DNA, 653 bp, Homo sapiens
  CDS (54)..(350)
cccaccgctttccgagcccgcttgcacctcggcgatccccgactcccttctttatggcgtcgctcctgtgctgtgggccgaagctggccgcctgcggcatcgtcctcagcgcctggggagtgatcatgttgataatgctcggaatatttttcaatgtccattccgctgtgttgattgaggacgttcccttcacggagaaagattttgagaatggcccccagaacatatacaacctttacgagcaagtcagctacaactgtttcatcgctgcaggcctttacctcctcctcggaggcttctctttctgccaagttcggctcaataagcgcaaggaatacatggtgcgctagggccccggcgcgtttccccgctccagcccctcctctatttaaagactccctgcaccgtgtcacccaggtcgcgtcccacccttgccggcgccctctgtgggactgggtttcccgggcgagagactgaatcccttctcccatctctggcatccggcccccgtggagagggctgaggctggggggctgttccgtctctccacccttcgctgtgtcccgtatctcaataaagagaatctgctctcttcaaaaaaaaaaaaaaaaaaaaaaaaaaaaaaaaaaaaaaaaaaaaaaaaaaaaaaaaaa

SEQ ID NO: 116 - protein, 98 aa, Homo sapiens
MASLLCCGPKLAACGIVLSAWGVIMLIMLGIFFNVHSAVLIEDVPFTEKDFENGPQNIYNLYEQVSYNCFIAAGLYLLLGGFSFCQVRLNKRKEYMVR

SEQ ID NO: 117 - DNA, 5227 bp, Homo sapiens
gtttgcacaagtagtggtgtcactttatagtttcctggacgtttgatttggtgttcgctggagccaggtggaggtgcctgccctccacaagcctgtgctaggggcagtcttaccgtggctggatttttaggagtggctttgcagatctgaggtgaaatcatcgatagggctgcttctgtgatattttagtctaaataccgaactcataactcccaagcagcccggaagttgtctggaagctctcaccgtgtacatacccaagcttgacttgggcattggagcaacggggtccttctgctggccagactggggacttctggcccagccacatggtagctgagtgtagcgtgtggggtcaggaaggttgcattctgatctcaactcttggaagtttcctttccccatctgtgaaagaagaggatggattagaggaggtgaaagttcatgcccactctaaaggccatttcacttggatctctgaatctagacatgagtaaaatgcttactgcatcttattttataccaaacactactgttcatttgttaaattggactctcatgaccatggacaaatagggaatcaggtgtcaatctgtactaacttcaggacattgataataatggtaatataatggaatgtcgatataagattaggtttggattttgtgaatcaagtctttctttgaaaactatgcaacataagactgacaggagacagtttggctatatattattctaataaaccaccacaaagagtaataaaccatgacaaagagtagtctaataaccttaaaccatttaagaaaagattccaactaagaaagactgtatataattcagcagaaatttatgaagtattatatgactcattcattcaagctctaaaaaatacctacaaggtatttaatttacttgcccatggaaaagtgatgtggacttcataaactataaactcttgaaattaagaatgttgttcatcaaaataaagggagtatcatgatttttaaatttaaaaaaatttcagtgagtagcgagatagctctaaaaagggatttcagattcataatgaagaaaagtttgttggatattattttctgaaggtcagtagaggcctgtaaagcagaagactgagctaactggtgacatcatgtgggttgctgtggatttatattaacagctgagcttgtatgccttagtctgggctctatgttctaagtaaaataaagtttcagctggtctgaatttgacgttggcattgttattggcgtatgttctgaaaaattaaaagttctgaatttttggcaaataggaaaattgaccaaagtcagccatcaatgataatattattgagagtctggcatgtgccaagcagtgttcagtgttttatattacattatttcattttattctcatattcagagaaagccacattatttctgttttataagtaaggaaattgagcctcaaagggagtaaagaacttgaccaggttactgagcgggtaagaatcagagttcgagtctcaaccttatccctgcttttacctgcaaagcatcccatccaacgcctgtcagagatgtcactcatagaattctcctgtatttgccaagtaaacaactccccgaagcctggatagcaccaagcccattttctcactccaattagattgaaatataatctaaacatgtatttactggatttgcaggaacactattttttgtttgttttttgttgtatctgtttaaagccttagaaccattgctttgtttggagtagcctgattccacttcagtcaaatacttttttaaaatttcatctttttttgacttggggccagacacattcacaggactccattatctggggtttctttgaatttggaatgcttttaaacacttataccttatttctgctgttactgaaaaaaatgccaccatggtcagaaggacctgtgctgttttttcctttgcatctgtgaggtaggccttactgagagaggcctgtgctggggcctagggtaaagcttcctcctctgggaactcccttcccttctagggttcccccaggggtggaggccttgctttcccatgcctctgggatgtaggagattctcagtttcctggcacaaacggagggaagggctgggctagttttgtcggggaggaggttgctgttaggcgggcaaatggatccttttgcttacaacttttaccattattcagttcactatttcaatggcaaatatgttggtgagatcccttccaaatttctctacaaatacttatacttttgataagcactatttaaaaaacttgttagttaaaagatttggtagaaaaatcagaaaatactgactcaaaaggaagaagtttgaaagattcctgtaattatattcccagaggcagaaccacggcaattatttacaactcttgtgactttcatggtgctacttccctgtttgttctgtgcaaatattctcctaatacatcattttttttcaccaaatgtgagcatactacatgcattgtagtttttctaaacttcttttaaaactaaacaatattttgtggacatctttccatgtcagtatatctggattcatatttgtagctatctatacttttacataattttaatgctataaaatattccccatggattctcacatttactccaataattccttactattagaccaaaaaatggaggcatggatatttctattttctctttgaccaagctgctgttccttaggagggtagtataaaatatttatttgttattttatcaaacatttattgtcttctcggtgtcagacattgtactttgggcttggaatacaaaaaagaaaaagacagtttctgctcatgagggactcacagtcttatgcagacaataaatattgtaaacagacaattacaatgatttctttagtagaagttggacatacattgtcccttctaactttaaattttatagactgatagacaaacataggaacagaaatatttttttccgtctttatttatgagcaataatttcatctttttaaaggaaagaaattaaaacagctataggatcctttgaggcttttatttgtcatctggtctaggagaaacaaaaaaaccaccaccagtgggcctttctatgaagatcagcaagaaagccctgctttctatgcctcgtggaagggaaggttccttctgggttaccatttgagttgtttctcaatgcgtcattgctcctgctttcttgttttcaagagtataagacctagtattggatgttgacttgagtgccatctagcttttttgagtcaccttacagtatttaagcacttttcaatgcagtgggtcagcaggggcgttcaaatacagtggtcaacctctaacagagtcctctgaatttccatcccttcttctctcctgcttgctttcctttctgtggtggcgatgacgccgttaggttgatgtagagagcaatgttgacatccttgattgtcctctgactgtaagtcacccacgttccctttgttagcgtaaagtgggccctgctctcctgtgctgctcctgtccacccctgcttgtatgccctcctcagaaatctcccccaccccccatgttcttggttttctttgctttctgcaaatttgttttaaccttagtagaaatcatggttgagtttttaaaccgtggcttagtttcttctctactcagtaagagtagcaacaccaaaaacaccccctaccacaaaacaacggtcaagtgtcttcctgaatatgagcagtatttttactttaaaaggctccaagtgctccaagactatgcttgatatactattttcccttagtctccacttgtcaatatttataaagggactctgtgcatcatttcctttaataaaatcacccttgaatcctccataccagtcaggagatgccaaggcacaaaacaacctgcagaaatcaggccttgcagagctcagtgagtgtagactctagagctttgcatcacccagatatttgcccttcacttaaactccactcagatcacttatgtagcctggtatatgtattactcactctttggttttgcacagattaagatgaaatgacttttagaagatactggaatctccttgctacaggcatgtgttgcctaataaaagctttctgcacgtacgtagtctaataaaagatgatgaggctttctaatagccattgctttgtttggagtgcctgatttttatttagcacccacctttttctggaaggaagaaattcctaaagaaaagaagtttgcaggtgccagatatctttcctttgcttttggacattgcttttacattctaaataaaacagtcaaaaaaataatttgaatactactgcctgtttgagttcattatttcataagaaatactgctgatatacagttacgaagcacaccccaggataaggtcatttttggccatgtcgaaatgtagctttctaacctaagcctttgtgtgggtgtgtttttcttccacaggagatggcgaatattttggctcagaagcaactgcgttccatcattttaacagtgagtacctatgcgctgtgacctctttgtgggggaggagtggcctggtgcatttgttaatctcttcttttggcttcagtctgtggtttgttctgtgacttccttctgtggtgaagcagtaggaactctaatgaaggaaaaagtgagtttttggaattggaataaataaaggctttcccacaggaattgcctcattggattggagggaggggtttctggaactgctctggagagagaaagggggaacgcattctggccggaagggttggatagctctctcagtggggcaggttagggagatcagggcttaaaagattcaccctgatgaggttttgctctttcaatgaggaagctagctgtaaacatatcaggtaccaagagaagtcctgagatgttgaacatcagttttgggggcccgcatgcaagagagaggaaggaaagatatagataggagccactcattcgctgcgatgcaagatgaccttaaaccttggtggaaaaaaaaaaaagccctaagtgtcaccttgcaaatgtttagaaataaaccaaataacaagatttcctgaggccttacccgctatttgacttaccagctacttgaaagaagcaggttgattgattgccctgcttacaaaaaaaaaaaaaaaaaa

SEQ ID NO: 118 - DNA, 728 bp, Homo sapiens
  CDS (327)..(590)
ggttgggaccctgtggcgcatccttgtcgctcgtgtccttctcatgcccggcgacgcgtctttgtggtaacgccctgctgccatctcttttcttctctatgcgaggatttggactggcagtgagaataagagacaacgattcacgtctactttctaggatgacttccatgtgctccatctcgcgcgtccctgagcatgttgaatttccaaatcctaaataagccgcgcggtgtagtttgtattatgttgcgtttctctttctgctttcctcgccctttctccatcatcctttaggctctacagagtgaaggtttaaatccaaggtcatggcaaaacatctgaagttcatcgccaggactgtgatggtacaggaagggaacgtggaaagcgcatacaggaccctaaacagaatcctcactatggatgggctcattgaggacattaagcatcggcggtattatgagaagccatgccgccggcgacagagggaaagctatgaaaggtgccggcggatctacaacatggaaatggctcgcaagatcaacttcttgatgcgaaagaatcgggcagatccgtggcagggctgctgaggcctgtgggtgggacacccagtgcgaaaccctcatccagttttctctccatctcttttctttgtacaatcccatttcctattaccattctctgcaataaactcaaatcacatgtctgcaaaaaaaaaaaaaaaaaaa

SEQ ID NO: 119 - protein, 87 aa, Homo sapiens
MAKHLKFIARTVMVQEGNVESAYRTLNRILTMDGLIEDIKHRRYYEKPCRRRQRESYERCRRIYNMEMARKINFLMRKNRADPWQGC

SEQ ID NO: 120 - DNA, 972 bp, Homo sapiens
  CDS (3)..(461)
aagcgaagaaggaagctcctgcccctcctaaagctgaagccaaagcgaaggctttaaaggccaagaaggcagtgttgaaaggtgtccacagccacaaaaagaagaagatccgcacgtcacccaccttccggcggccgaagacactgcgactccggagacagcccaaatatcctcggaagagcgctcccaggagaaacaagcttgaccactatgctatcatcaagtttccgctgaccactgagtctgccatgaagaagatagaagacaacaacacacttgtgttcattgtggatgttaaagccaacaagcaccagattaaacaggctgtgaagaagctgtatgacattgatgtggccaaggtcaacaccctgattcggcctgatggagagaagaaggcatatgttcgactggctcctgattacgatgctttggatgttgccaacaaaattgggatcatctaaactgagtccagctgcctaattctgaatatatatatatatatatcttttcaccatatacatgcctgtctgtcaatttctggttgggctgggaggccacacacacacactgacatgacagggcttgggcaagactcctgttctacttatccttttgaaatacctcaccctgccactccaccatgtatgatcattccagagatctttgtgactagagttagtgtcctaggaaaaccagaactcagaacttgcctccatggttgagtaacaagctgtacaagaaccccttttatccctggaagaggctgtgtatgaaaccaatgcccagggtttgaagggtgttagcatccatttcaggggagtgtggattggctggctctctggtagcattttgtcctcacacacccatctactatgtccaaccggtctgtctgcttccctcaccccttgcccaataaaggacaaggacttcaaaaaaaaaaaaaaaaaaaaaaaaaaaaaaaaaaaaaaaaaa

SEQ ID NO: 121 - protein, 152 aa, Homo sapiens
AKKEAPAPPKAEAKAKALKAKKAVLKGVHSHKKKKIRTSPTFRRPKTLRLRRQPKYPRKSAPRRNKLDHYAIIKFPLTTESAMKKIEDNNTLVFIVDVKANKHQIKQAVKKLYDIDVAKVNTLIRPDGEKKAYVRLAPDYDALDVANKIGII

SEQ ID NO: 122 - protein, 156 aa, Homo sapiens
MAPKAKKEAPAPPKAEAKAKALKAKKAVLKGVHSHKKKKIRTSPTFRRPKTLRLRRQPKYPRKSAPRRNKLDHYAIINFPLTTESAMKKIEDNNTLVFIVDVKANKHQISQAVKKLYDIDVAKVNTLIRPDGEKKAYVRLAPDYDALDVANKIGII

SEQ ID NO: 123 - DNA, 2303 bp, Homo sapiens
  CDS (165)..(2135)
ataagaaaaaaaatattttaaaagggtaaccgttaaacagctaggacctgcaacttcagtgcttctgggataactggaacatcagaaggacagattttattacagcataatcacacctcatttctttcatcagcagttgtcaccagacgctgttacttcctaaaatggcggacaatcttcccacagagtttgatgtggttataatagggacaggtttgcccgaatccatccttgcagctgcatgttcaagaagtggtcagagggttctgcatattgattcaagaagctactatggaggaaactgggctagtttcagcttttcaggattgctatcctggttgaaggagtatcagcaaaacaatgacattggggaagaaagtactgttgtatggcaggacctgatccatgaaacagaagaagccatcactcttcgcaagaaggatgaaactattcaacacacagaagcttttccgtacgccagtcaggatatggaggacaacgttgaagagattggtgctctgcagaaaaatccttctttgggggtgtctaataccttcactgaagttctggattctgcattacctgaagaaagccagttatcatattttaatagcgacgaaatgcctgcaaaacacactcagaaaagtgatacagagatttcactagaagtaactgatgtagaggaatcagtggagaaggaaaagtattgtggagataaaacttgtatgcacacagtttcagataaagatggagataaagatgaaagcaaatctacagtagaagataaggccgatgaaccaattagaaataggattacttactctcaaatagttaaagaaggcaggaggtttaatattgatttggtgtcaaaactgctgtattctcaaggattgctaattgatcttttaatcaaatcagatgttagtcgttatgtagaatttaaaaatgtcactaggattcttgcatttcgggaaggaaaggtagaacaagttccttgttccagagcagatgtctttaatagcaaggaactcaccatggttgaaaagaggatgctaatgaaatttctcacattttgtttagagtatgaacaacatcctgatgaataccaagctttcaggcagtgttcattttcagaatacttaaaaactaaaaaactaactcccaaccttcaacattttgtactgcactcaattgcaatgacatcagaatcatcttgcactacaatagatggtcttaacgcaactaaaaacttccttcagtgtctcggacggtttggcaacaccccctttttatttcccttgtatggccaaggagaaattccccagggtttctgtaggatgtgtgcagtttttggtggaatctattgtcttcgtcataaagtacaatgctttgtagtcgacaaagaatctggacgatgtaaagcaattatagatcactttggtcaaagaataaatgctaaatattttattgtggaagacagttacctttctgaggaaacatgctcaaatgtgcagtataagcagatctctagggcagtactcattacagatcagtctatactaaagacagatttagatcagcagacttccattctgatagttcctccagcagagccaggagcttgtgctgtacgggtcacagaattatgttcttcaaccatgacatgcatgaaggacacctatctggtacatttgacatgttcatcttctaaaacagcaagagaagacttagaatcagtggtgaagaaattattcactccgtatactgaaacagaaataaacgaggaagaacttacaaagccaagactcttgtgggctctttattttaatatgagagattcctcgggaatcagcagaagctcgtataatggcttgccttccaatgtttatgtctgctctgggcctgactgtggcctgggaaatgagcatgctgtcaagcaagctgaaacacttttccaggagatctttccaactgaagaattctgccctccacctccaaatccagaagacattatctttgatggtgatgataagcagccagaggctcctggaaccaataatgtagtaatggccaaactagaatcctctgaggaaagcaaaaacctagaaagcccagagaagcaccttcaaaattagaaaagagcaatctcgaaatgctgttttggacctccttcatggcatcagaattttctcatttaaaggacagtttcccatatgagtaattagaagtggttatatatgatgaatgctatgcagatgttgtctttaactctcagacattcagcattgaatatctttgttaac

SEQ ID NO: 124 - protein, 656 aa, Homo sapiens
MADNLPTEFDVVIIGTGLPESILAAACSRSGQRVLHIDSRSYYGGNWASFSFSGLLSWLKEYQQNNDIGEESTVVWQDLIHETEEAITLRKKDETIQHTEAFPYASQDMEDNVEEIGALQKNPSLGVSNTFTEVLDSALPEESQLSYFNSDEMPAKHTQKSDTEISLEVTDVEESVEKEKYCGDKTCMHTVSDKDGDKDESKSTVEDKADEPIRNRITYSQIVKEGRRFNIDLVSKLLYSQGLLIDLLIKSDVSRYVEFKNVTRILAFREGKVEQVPCSRADVFNSKELTMVEKRMLMKFLTFCLEYEQHPDEYQAFRQCSFSEYLKTKKLTPNLQHFVLHSIAMTSESSCTTIDGLNATKNFLQCLGRFGNTPFLFPLYGQGEIPQGFCRMCAVFGGIYCLRHKVQCFVVDKESGRCKAIIDHFGQRINAKYFIVEDSYLSEETCSNVQYKQISRAVLITDQSILKTDLDQQTSILIVPPAEPGACAVRVTELCSSTMTCMKDTYLVHLTCSSSKTAREDLESVVKKLFTPYTETEINEEELTKPRLLWALYFNMRDSSGISRSSYNGLPSNVYVCSGPDCGLGNEHAVKQAETLFQEIFPTEEFCPPPPNPEDIIFDGDDKQPEAPGTNNVVMAKLESSEESKNLESPEKHLQN

SEQ ID NO: 125 - DNA, 2853 bp, Homo sapiens
  CDS (24)..(779)
gccactagacctggtcagacacaatgttggcactcttggttctggtgactgtggccctggcatctgctcatcatggtggtgagcactttgaaggcgagaaggtgttccgtgttaacgttgaagatgaaaatcacattaacataatccgcgagttggccagcacgacccagattgacttctggaagccagattctgtcacacaaatcaaacctcacagtacagttgacttccgtgttaaagcagaagatactgtcactgtggagaatgttctaaagcagaatgaactacaatacaaggtactgataagcaacctgagaaatgtggtggaggctcagtttgatagccgggttcgtgcaacaggacacagttatgagaagtacaacaagtgggaaacgatagaggcttggactcaacaagtcgccactgagaatccagccctcatctctcgcagtgttatcggaaccacatttgagggacgcgctatttacctcctgaaggttggcaaagctggacaaaataagcctgccattttcatggactgtggtttccatgccagagagtggatttctcctgcattctgccagtggtttgtaagagaggctgttcgtacctatggacgtgagatccaagtgacagagcttctcaacaagttagacttttatgtcctgcctgtgctcaatattgatggctacatctacacctggaccaaggtatatgcaccaatactgagacaagctgatgaaattaaaaccaacgcctctctattatatttgtcctaactatgtagtccactttcagagccgattttggagaaagactcgctccacccatactggatctagctgcattggcacagaccccaacagaaattttgatgctggttggtgtgaaattggagcctctcgaaacccctgtgatgaaacttactgtggacctgccgcagagtctgaaaaggagaccaaggccctggctgatttcatccgcaacaaactctcttccatcaaggcatatctgacaatccactcgtactcccaaatgatgatctacccttactcatatgcttacaaactcggtgagaacaatgctgagttggtaagtagcaaagtagtaggtatgacattttactattgagattttttaaattctaatcctgaaaaaaaaatcattataagaacactttctggaagtccctttattgatttttttggtagtagaattgaaaaacttattacagatttataaggaatctggagttggctaaaagaaatacaattttcacgcaggaaattgttccccacatgcgatttattgactaatcttcaaaatgacaatagttccatttcctctggcttcaccacaatgctgacttacatgatgatttcagatgcatatgagataatcaacaaagttgcttgatcacatacatatttttttttcagtcagttttgtgaagctgccctgagctgaatttgacacagatccagagcatagcagagcacagcagatgtcattaggaatttgtcacatttgggtgatatcaagtttagtcattaaatactaaaattgtttatttcactttttgattgggtgagactcaaaagtaaatcaatcaatgaacaaataatgtgaatgagtctttaccacatacagggaataaagcaaagaaatgtaagaatctctgacatcaaaaaaagctagcaatcttattgaacaatcaagacataatcacttgagcagctaaataatgagttttctcatagaaatatcacatgtcaatgaataattttttaaataagcatgtttgaacctttcaaacaatatttctttaatttatgaaacatctggctgccagaaattggcaccaataaactaaaagagcaaatataagatttaaagcatttgagttatgccaaaaaaaaaaatgtattccatttagacaatgacatggatatttggcttacctaaatgcataaatttgaagacctagtaactttaaaactgaaaattgttgttttatactttcagattcagtctttcggagaccaaataaaatatgtaatgccgtaaatattttgagaacaaatcagaaaaataacccagtctcctagaaaattgatagctaatagttggatgggcccttttctttaaaaaacaatacaatttttcaaaaagcttttcatttttccccatccatggccaaaaatatatatatatatacatatatatatatacacatatatatgtgtgtgtgtgtgtgtgtatgtatatatatatatatatatatatatatatatatatatatatatgttagcaccgccaagcatttcagtttttcacttaagcttggtctgtatgtgttcccaatgggtgctcacagtattgttctcccagagatgggtgtggttggctctcatttctgtccaaaatttctggccaccagaaaagaggaggtgggggtatgtagtttgtataactcatgtaaatatatttaagttgtgccatatcagaagagaaaaagtcaaagtcataactacatactaatgagttaattaaaataaaaaaattacaaaacacattaagggtagcaataacatatatatatccagtttgcttcaatatcaactagttttagacataactactaaaagactaacactaaagaataaagtttaaagtgttcctggaagctgagctaccaaagttttcttattcaatacattttcttattggaggaataagtttaagcccttttagtgatgagacagctttgttgccactagttgtatacaataacaaccagaacctgggctactctaaaagtctccaaatcttcttaaaaaaaaaaaaaaaaaa

SEQ ID NO: 126 - protein, 251 aa, Homo sapiens
MLALLVLVTVALASAHHGGEHFEGEKVFRVNVEDENHINIIRELASTTQIDFWKPDSVTQIKPHSTVDFRVKAEDTVTVENVLKQNELQYKVLISNLRNVVEAQFDSRVRATGHSYEKYNKWETIEAWTQQVATENPALISRSVIGTTFEGRAIYLLKVGKAGQNKPAIFMDCGFHAREWISPAFCQWFVREAVRTYGREIQVTELLNKLDFYVLPVLNIDGYIYTWTKVYAPILRQADEIKTNASLLYLS

SEQ ID NO: 127 - DNA, 3051 bp, Homo sapiens
  CDS (35)..(607)
ggcgcgcggcgagctgagggtggcggcggtcgacatgttccaggtcccggatagcgagggcggccgcgccggctccagggccatgaagcccccaggaggagaatcgagcaatctttttggaagtccagaagaagctactccttccagcaggcctaataggatggcatctaatatttttggaccaacagaagaacctcagaacatacccaagaggacaaatcccccagggggtaaaggaagtggtatctttgacgaatcaacccccgtgcagactcgacagcacctgaacccacctggagggaagaccagcgacatttttgggtctccggtcactgccacttcacgcttggcacacccaaacaaacccaaggatcatgttttcttatgtgaaggagaagaaccaaaatcggatcttaaagctgcaaggagcatcccggctggagcagagccaggtgagaaaggcagcgccagaaaagcaggccccgccaaggagcaggagcccatgcccacagtcgacagccatgagccccggctggggccgcggcctcgctctcacaacaaggtcctgaacccaccgggaggcaaatccagcatctccttctactaagagaagccactgctccacccggagccagaccagaaactcaagagatagggtagccatgttttcatttccttttgcccaaatgagcggggtgggaagagggttagtcttatgtgagcctggctgctcagcgtctcctggccgtcatgacagctgcttggagacccgtgccttccagatggctgggagatgcctctgtggggatgaaatggggcacccctggccatcactcatgtgtagtccaggtttgagaggaactggaaggggggtgagggtggggaggtggggcagggcatggtccttggatcaacagcccgccagctgattggatgtctaggaatgactgaaagaaaccaaaacagcctgtccactgctgctgtgggatggaggaggcgtaagcagaaacactaacagtatattgacctcttagcagaaccgcttccattctggagatcacggctgctaaatccagcatccccacttcattttacccccagcatattgttctgtagtcttttcttgaaacatcttgattgcttttcctcggcagctttcaaaaaaccaaataataatagttatccgtcttctacttcatggaagattgttttggtgccctgaccctctgaagtgcccagttcctgccatctgaaacctcggcctgatctgatctcatgttggaatctgcctgtctttcacacagggctggtcttggtcctttacatgccagttttgcttgtgaattcttgcttttttcctctcatcagccttaagtttaggcgtttgttgttctccagtgatgtagacagttcccttcacaagtcacagttcttcccataaatgaggcccgctgacctctgcgggactttaaaaatctattcagatatttccgagtaagtggcttgtttaaattcttcctgtgtctttctttattccttaattggttggtggaaagaagagatgcttgggaaccttgggttcttaggtttggattctttaataatatctaaaaagctaaattttaaataccagctttacataaatgattgttgactctggtctgtttctgacacctttccagaaaaaagtcaattgttcaggtacaccaaagaggaagaagagctgtggaggccaccctctacaaagctttatagaacttctggatctaactcacaaacaagcttccagaagagactagagaccttaggccaggagatgaaggagttcagtagcaaagtcacacctgtccaattccctgagctttgctcactcagctaatgggatggcaaaggtggtggtgctttcatcttcaggcagaagcctctgcccatccccctcaagggctgcaggcccagttctcatgctgcccttgggtgggcatctgttaacagaggagaacgtctgggtggcggcagcagctttgctctgagtgcctacaaagctaatgcttggtgctagaaacatcatcattattaaacttcagaaaagcagcagccatgttcagtcaggctcatgctgcctcactgcttaagtgcctgcaggagccgcctgccaagctccccttcctacacctggcacactggggtctgcacaaggctttgtcaaccaaagacagcttcccccttttgattgcctgtagactttggagccaagaaacactctgtgtgactctacacacacttcaggtggtttgtgcttcaaagtcattgatgcaacttgaaaggaaacagtttaatggtggaaatgaactaccatttataacttctgtttttttattgagaaaatgattcacgaattccaaatcagattgccaggaagaaataggacgtgacggtactgggccctgtgattctcccagcccttgcagtccgctaggtgagaggaaaagctctttacttccgcccctggcagggacttctgggttatgggagaaaccagagatgggaatgaggaaaatatgaactacagcagaagcccctgggcagctgtgatggagcccctgacattactcttcttgcatctgtcctgccttctttccctctgcgaggcagtggggtgggattcagagtgcttagtctgctcactgggagaagaagagttcctgcgcatgcaagccctgctgtgtggctgtcgtttacatttgggaggtgtcctgtatgtctgtacgttggggactgcctgtatttggaagatttaaaaacctagcatcctgttctcaccctctaagctgcattgagaaatgactcgtctctgtatttgtattaagccttaacacttttcttaagtgcattcggtgccaacattttttagagctgtaccaaaacaaaaagcctgtactcacatcacaatgtcattttgataggagcgttttgttatttttacaaggcagaatggggtgtaacagttgaattaaacttagcaatcacgtgctcaaaaaaaaaaaaaaaaaa

SEQ ID NO: 128 - protein, 190 aa, Homo sapiens
MFQVPDSEGGRAGSRAMKPPGGESSNLFGSPEEATPSSRPNRMASNIFGPTEEPQNIPKRTNPPGGKGSGIFDESTPVQTRQHLNPPGGKTSDIFGSPVTATSRLAHPNKPKDHVFLCEGEEPKSDLKAARSIPAGAEPGEKGSARKAGPAKEQEPMPTVDSHEPRLGPRPRSHNKVLNPPGGKSSISFY

SEQ ID NO: 129 - DNA, 4524 bp, Homo sapiens
  CDS (276)..(1784)
gcgcggggcgcggagtcggcggggcctcgcgggacgccgggcagtgcggagaccgcggcgctgaggacgcgggagccgggagcgcagccgcggggtggagttcagcctactctttcttagatgtgaaaggaaaggaagatcatttcatgccttgttgataaaggttcagacttctgctgattcataaccatttggctctgagctatgacaagagaggaaacaaaaagttaaacaagcaagcctgccataagtgagaagcaaacttccttgataacatgcttttgcgaagtgcaggaaaattaaatgtgggcaccaagaaagaggatggtgagagtacagcccccaccccccgtccaaaggtcttgcgttgtaaatgccaccaccattgtccagaagactcagtcaacaatatttgcagcacagacggatattgtttcacgatgatagaagaggatgactctgggttgcctgtggtcacttctggttgcctaggactagaaggctcagattttcagtgtcgggacactcccattcctcatcaaagaagatcaattgaatgctgcacagaaaggaacgaatgtaataaagacctacaccctacactgcctccattgaaaaacagagattttgttgatggacctatacaccacagggctttacttatatctgtgactgtctgtagtttgctcttggtccttatcatattattttgttacttccggtataaaagacaagaaaccagacctcgatacagcattgggttagaacaggatgaaacttacattcctcctggagaatccctgagagacttaattgagcagtctcagagctcaggaagtggatcaggcctccctctgctggtccaaaggactatagctaagcagattcagatggtgaaacagattggaaaaggtcgctatggggaagtttggatgggaaagtggcgtggcgaaaaggtagctgtgaaagtgttcttcaccacagaggaagccagctggttcagagagacagaaatatatcagacagtgttgatgaggcatgaaaacattttgggtttcattgctgcagatatcaaagggacagggtcctggacccagttgtacctaatcacagactatcatgaaaatggttccctttatgattatctgaagtccaccaccctagacgctaaatcaatgctgaagttagcctactcttctgtcagtggcttatgtcatttacacacagaaatctttagtactcaaggcaaaccagcaattgcccatcgagatctgaaaagtaaaaacattctggtgaagaaaaatggaacttgctgtattgctgacctgggcctggctgttaaatttattagtgatacaaatgaagttgacataccacctaacactcgagttggcaccaaacgctatatgcctccagaagtgttggacgagagcttgaacagaaatcacttccagtcttacatcatggctgacatgtatagttttggcctcatcctttgggaggttgctaggagatgtgtatcaggaggtatagtggaagaataccagcttccttatcatgacctagtgcccagtgacccctcttatgaggacatgagggagattgtgtgcatcaagaagttacgcccctcattcccaaaccggtggagcagtgatgagtgtctaaggcagatgggaaaactcatgacagaatgctgggctcacaatcctgcatcaaggctgacagccctgcgggttaagaaaacacttgccaaaatgtcagagtcccaggacattaaactctgataggagaggaaaagtaagcatctctgcagaaagccaacagttatattcttagggatagcctagaaggaatatatggttagaactaagtgtgactaatcatctgagccttgaagagaaacttcagtgcctctaaacagatcatctacaaaacaacaggtaaacatttatgccagttaagtgggtcatgtttttgtttcttgggtttttcctaaatttaagtgaggttgggcttaccttgtagataaaattatgttttctttttggtaaatacttgaatgtggataacgtcaaatcagaatattttgtgaggaggtgatgatttgaaattaagctagatttctagggaggtgttggttccaatgaaggatgggaagaaattaaaatagtcttcaaacttcttccttattatatttggttgctttggaaaagattggtcctatcctcaatctaatttattcactattaatattttaaaaacattcctgagatacttaaaaagacccacttagcgattatagttgctcaatgaaacaagaatttatttatgcatagatttttctctgtatcttaccaaaatccactttacttagataacactaaattgttcttaaagactactcatttcccaataatcctttatgatttcaaaatttctagtggctcagaagtgaattttattttatttgtctttcacttgaataagtgagaacccagaaattaataatgttgtttattgcttactgtcaggactatttcaaagactaagaagagtttcttctaacccctccctctcaaaggaatcctaaattattagttgttagataagttttgtatgctaagatattcaggtttatagtttatgtatgtgtgtatatatataaatatatatgtatatataaatattatgttcagtttggagtctggcacaactccattatgtggattagagagtaagatattatggatgataaagtactaaatgaaacataatatttatttataaaagtgtgtagattgttaaatcacaaaaagagtgctatgaccattatgtatgaggaaacaggcctttgacctcctggaaagcactgctcaaaagtcattagtgcccatttttgaattccccaaacagaaagcttcttagaaaacacgctgagattttatttacagggaattctttgacacatttcaattggtgtgtagtcaagtatagcaagtacttaataatgactgaatttcatgttcctacagtcatacatattcattagaagttttatgttgttggtctgatctgattcttctttgtttgtgggtggaacggcactgagagaagtatagttttttaaacttgaacatgttcagtagttacattgccttagaaaacccagacacatagcagtggaaatgaaagaaatggcatcagaagtgacttaatttagcaattgtgattcctcttgtaaaacaaaacaaaaaaacaatgccatattttttggagaaaagttggcaatataggggtttcgttgtctgtttcacaagaagactcatttgttcttttgggggaaccagtgccttacagattttgtatatactgtaattattcaggactagggaacaaacaattgtattgtatttgttacagattgtatatggctttgttttaacattcccctaaataaaatggcttcattctccccttggaaaaaaacatgactgttatgttatagttgtgcttatttatttatttatttatttatttattatctttgaaaatatcccattgtagcaggtgggaaggcaccatgaaggaggcagatgcaggtaagtttttcacatttcatggcaggaggacaagagaaatggtctgatggcttctactttctttgtgaaggaaacacagtcatctactgagagtgaggggaaaggcagggaagtcagtggtttaagagaagtgaagaaggtttaaaattgcactggaaaattacagcttgatggggaaagagccagatggttacgggcaactctgagggccaggttaggcttcctgaagctgactgtggcacagtggccaagcgtagacttgggactgccaggtggcctgttggtgtgaatccagcttccctcactccctcagttgtgtgactgggcacattttgacctctttatcatgcaaatgcagcaacaggtcatggaaagtaagaattattactatcaaggggctgatgggccagaggagggaaggaattaattagaggagctaacagaccaacaaacaaacaaacaaacgaacaaaaaacccaggtcccaggacagggaatcctgatggggcggaggtggtatctccgcagttactgagagaggggctgtggtcagtttcttccccttgaagatgtttcttccccttgaagatgagaatgatgttaatatccactatctggagttgttctgaagatgaaatgacataatccatgcaccaagcatgtggtaagtgctcaactatagtattaacagaaattcatagtgccacttttcttgtggtttatgattttttttatctttttgtcagcaacccaaatacaggtatagagacaacgaagataggattcattcagggtactggtttatcatgcaaacgcagcaacaggtcatggaaggtaagaattattactatcaaggggctgatggaccagaggagggaaggaattaattagaggagctaacagaccaaaaaaaaaaaaaaaaaaaa

SEQ ID NO: 130 - protein, 502 aa, Homo sapiens
MLLRSAGKLNVGTKKEDGESTAPTPRPKVLRCKCHHHCPEDSVNNICSTDGYCFTMIEEDDSGLPVVTSGCLGLEGSDFQCRDTPIPHQRRSIECCTERNECNKDLHPTLPPLKNRDFVDGPIHHRALLISVTVCSLLLVLIILFCYFRYKRQETRPRYSIGLEQDETYIPPGESLRDLIEQSQSSGSGSGLPLLVQRTIAKQIQMVKQIGKGRYGEVWMGKWRGEKVAVKVFFTTEEASWFRETEIYQTVLMRHENILGFIAADIKGTGSWTQLYLITDYHENGSLYDYLKSTTLDAKSMLKLAYSSVSGLCHLHTEIFSTQGKPAIAHRDLKSKNILVKKNGTCCIADLGLAVKFISDTNEVDIPPNTRVGTKRYMPPEVLDESLNRNHFQSYIMADMYSFGLILWEVARRCVSGGIVEEYQLPYHDLVPSDPSYEDMREIVCIKKLRPSFPNRWSSDECLRQMGKLMTECWAHNPASRLTALRVKKTLAKMSESQDIKL

SEQ ID NO: 131 - DNA, 1076 bp, Homo sapiens
  CDS (176)..(778)
gctgcccgggcagcgggggagcagcgagcgggcttccgcgagccggagaaggcacaggcctgtcccgggtcccggcaggtctgcgcgtctgttcccagcgctctgcgaggcctaaaaaggaggagcaacctgtccagaatccctgcaggacaggaaaaggaggggaaatctcgacatggaaaaaccctacaataaaaatgaaggaaacctggaaaacgagggaaagccagaagatgaagtagagcctgatgatgaaggaaagtcagacgaggaagaaaagccagacgtggaggggaagacagaatgcgagggaaagagagaggatgagggagagccaggtgatgagggacaactggaagatgagggaagccaggaaaagcagggcaggtccgaaggtgagggcaagccacaaggcgagggcaagccagcctcccaggcaaagccagagagccagccgcgggccgccgaaaagcgcccggctgaagattatgtgccccggaaagcaaaaagaaaaacggacagggggacggacgattcccccaaggactctcaggaggacttacaggaaaggcatctgagcagtgaggagatgatgagagaatgtggagatgtgtcaagggctcaagaggagctaaggaaaaaacagaaaatgggtggttttcattggatgcaaagagatgtacaggatccattcgccccaaggggacaacggggtgtcaggggagtgaggggtggaggtaggggccagaggggcttacacgatatcccatacctttaatgcctttggccttccattctgatttctctgatgagaatattgctggccctgctttccctggtaggtatttgccaggcccaatgctttaaccttaagctgatactttgctttagatgtcagtctcgttaccagcagccttttgacccaactacggcgctctatattttagtagaggattttcacccatgtgcatggaaaagatgttcatggtacattgtaaaaaaataaaattaaaattaaaaaaagtttgcagaaccgcaaaaaaaaaaaaaaaaaaaaaaaaaaaaaaaaaaaaaaa

SEQ ID NO: 132 - protein, 200 aa, Homo sapiens
MEKPYNKNEGNLENEGKPEDEVEPDDEGKSDEEEKPDVEGKTECEGKREDEGEPGDEGQLEDEGSQEKQGRSEGEGKPQGEGKPASQAKPESQPRAAEKRPAEDYVPRKAKRKTDRGTDDSPKDSQEDLQERHLSSEEMMRECGDVSRAQEELRKKQKMGGFHWMQRDVQDPFAPRGQRGVRGVRGGGRGQRGLHDIPYL

SEQ ID NO: 133 - DNA, 1303 bp, Homo sapiens
  CDS (25)..(1086)
caagagcgcgggcggcgaggcaagatggcggcaaccaagaggaaacggcgtggaggctttgcagttcaggcgaagaagccaaaaagaaacgaaatagatgcggagccgccagctaagcggcacgccacagcagaggaggtggaggaagaagagagggaccggatcccaggccccgtttgcaagggaaagtggaaaaataaggaacggattctcatcttttcttccagaggaataaattttagaacaagacatttaatgcaggacttgagaatgttgatgcctcattctaaagcagatactaaaatggatcgtaaggataagctatttgtgattaacgaggtttgtgaaatgaagaactgtaataaatgcatctattttgaagctaagaaaaaacaggatctctatatgtggctttcaaattcacctcacggaccatctgctaaattccttgttcaaaatattcataccctcgctgaactgaagatgactggaaactgtttgaaaggttctcggccccttttgtcttttgaccctgcttttgatgaattaccacattatgctttgttaaaagaactcttaattcagatctttagtacaccacggtatcatcccaaaagccaaccatttgtggaccacgtgtttactttcaccattttggataataggatatggtttcggaactttcagatcatagaagaagatgctgctcttgtagaaataggacctcgttttgtcttaaatctcataaagattttccagggaagttttggaggaccaactttatatgaaaatcctcactaccagtcaccaaacatgcatcggcgtgtcataagatccatcacagctgcaaaatacagagagaaacagcaagtgaaagatgtgcaaaaactgagaaagaaagagccgaagactcttcttccacatgatcccactgcagatgtttttgtaacaccagctgaggagaaaccaatagaaatacagtgggtaaaaccagagccaaaagttgatttgaaagcaagaaagaaacggatttacaaaaggcaaagaaaaatgaaacagaggatggacagtgggaaaacaaaataagtcaatggaaacctgatttgtttttcagttactttatatttattttgtattcaatgtgtaaatacttttattatctaatactatcttacgtctaattagtgtagcatttacaagaaagaaaaattaagatcttaaaatcagtgattatctttttctaaataaaatatcaccagaattcatcagttaaaaaaaaaaaaaaaaaaaaaaaaaaaaaaaa

SEQ ID NO: 134 - protein, 353 aa, Homo sapiens
MAATKRKRRGGFAVQAKKPKRNEIDAEPPAKRHATAEEVEEEERDRIPGPVCKGKWKNKERILIFSSRGINFRTRHLMQDLRMLMPHSKADTKMDRKDKLFVINEVCEMKNCNKCIYFEAKKKQDLYMWLSNSPHGPSAKFLVQNIHTLAELKMTGNCLKGSRPLLSFDPAFDELPHYALLKELLIQIFSTPRYHPKSQPFVDHVFTFTILDNRIWFRNFQIIEEDAALVEIGPRFVLNLIKIFQGSFGGPTLYENPHYQSPNMHRRVIRSITAAKYREKQQVKDVQKLRKKEPKTLLPHDPTADVFVTPAEEKPIEIQWVKPEPKVDLKARKKRIYKRQRKMKQRMDSGKTK

SEQ ID NO: 135 - DNA, 3125 bp, Homo sapiens
  CDS (2469)..(2726)
actttgtctgttaaacatttggaggtttctcccttaacctaataccccgctgcgtcccaggtatgtttctcagcctgggcaggaattgcatgttttgagttccattgtgagcagccttacagctctgggctcccatcttaaggattattaaagagttttggcagttggtatttttctaaaactgatattgaccatagggaacatacttggaatttgtttttttttttaaatcctaaacctgacagttcctccttcagaggggcaaatgggaaactttaagatcacccacggtatagtactgctagaaagctgaagggggtcttgggccagatgcctggcttctgttctagctaaataagactcttgaataagtctccaggggtcccagcaggttctgtgggatcagttgtagctgggtacccagactgaggttttaaaaagactgctttttcattaagccagtttgcaactcattttccccggttctggattgggtagtggttgactgagggaaaagccaggctgctcttggccagataaggccctttccatcccagatcagagtgtatcagagaaagctgcacaaaagaggcaggcagcccaggaccctgagtactctggagaaactaggttccttccccaccctttaagaagacattccgtgcattagatgtactagagtggatgtattttgttgttttttaaattaactatttagcctcctcatcccccaccaaaaaagccatttagttattttttggttatattgatccatttgcaaatgagaagccagaaaagggagcagtcagggagggacttacaagttcctttcaagtttgagtacttgatgctcagcaaagatttcaagcttctgcagtagctctgggccaatgcttgactctttcatgaccacaagaaatgcagtttttctgcaaagggatccaaggtgaggtgtgtgtagggtttgaagttatacttctgggaagtgaaaagtcttgttcctttcaacctagaaataggtttgccacttaatgagtgagcagtaagtctgtgtaagaggctgaatgcatgcccgctcagataagccagtacactccttgcttagcaacagaacatcagggtgatgtggagaggggcaggatgtggacgccactttggaaatcggcaacatctgagggcaacaacaaacaagtgtgttgggaaataagaaataactcagttttgacaactggctttgtcagcttttgtgatgtttctttagcagtttattggaaagatggtatgagatgacgtgctgcttcattgaattgctctttcccccatctttgccaaatctcaatgtatcgttcttaaccccacctcctgtaaggggctttgctatgcttcagctggttgtctcagcagctgaagtgctgcccacctgtgtgagttgggtccaggaaaccatgtctgcccttctgataagggaagatgaatctagagctgggtgaagatctaaattttaaccaaacccctgggcccaggaaaataacaattgaaaatgtacaaggcagtgttttcaatattaaacttccccaaggaaagcacaaactagtctttttggaaagggagaaaggattaagccacacagtattagtctttgaagcagtactggtctctaggggctggtgccaaaatggagtcccatagtagttacactcgatggcctcatgtactatatactgtgccaaattgtattaaacagtggtggggagttactgggataagaacttgtctaaaagtttacaaaccaaaacagatctgttaggttggtgcaaaaaccacaattacttttacaccaacctatgtatttaagaatgtttggtttgccagattccaaatgaggtcttcagtgcagcaaagcccaaaaggtgtagactcagttatgcaattataaggttaaggcgtagaagaaagctgctgctaggtttttgttgcattttacttgactgctctgctgtttttcttgtctctcatgtttggttagctatgacttgagcatcttggtaactgacaaaggtcttccttgggggacttgaacatcttggtaaatgacaggtcttcttggaggactccagcagtatcttgtttaaacgactgaaaggactattaaggttgttgaattgtgttaattgggactcattgaggaaatgcgacattgatcctcctcttattccacagtgtgttttctgatcatataaagaaggttccgaaccatccatccccctcagagtttattcccctggtaagctgtaattgcatatccagtttaaactggactgggactgcatgttggtgaggatcggcaggggttttcccccttttcgaaagatgaaatagattcttgagcactggttgcagaagccaaaatagttcaaatagctttgcataaccattgggttctgcttctgattcaggtgctgggcatcatgtcctccctattcttctcttcttggaaacccagcctatctcataaatacctacttccgccacccatccaacctccctgctcctttcaacacaaatcttggatattgccaaaggaagccattcagcagctgctggggtttttcatccccctgacatgcatacatttgctctgggagaagtgtcttccctctgaccctggtccccagctccgtctgtgcttaattgctcttacctgttgcactaatgaatatgactaggttttaaagggggaatgtgaagcaataggcacatggggcttagatgaattggtcccacagatataccctgccttaagccgctgaggtgatgagtccactgctcatgtgaccctccacctttgtggatccctcttggtttgtgaccagtgtgtctgtttgttgaggttgtacaaacttgacaaaagttaatacttttgtttgtattttctgcactgttgcactctccaaatggccccttgagtatttttattgacttgttacacacatttttgtctttgatgtctacattttttcctttaatgttttttatttggaaggttacctgctgttggatttaataaatttgtttacttgaaaaaaaaaaaaaaaaaaaaaaaaaaaaaaaaaaaaaaaaaaaaa

SEQ ID NO: 136 - protein, 85 aa, Homo sapiens
MSSLFFSSWKPSLSHKYLLPPPIQPPCSFQHKSWILPKEAIQQLLGFFIPLTCIHLLWEKCLPSDPGPQLRLCLIALTCCTNEYD

SEQ ID NO: 137 - DNA, 2551 bp, Homo sapiens
  CDS (988)..(1275)
gtgggactggagatagaaaagacagagcccttgacttccttattctttaaattccttaagtgggatttttttttctcctttctccactcaggacattctcttttgaaatgacctaattttccacacttgtaacatttgtcttgtccctctcccttttcagtttttggagtcttagggtactgggtttgctttccctttttacctgtctttgagttctgtggcccccctgtctcatatcttttgtgaggcctggcaaatggaggcttaagcttggcctctggtgcattctgtcagaaaatttttctttttgctttggtttttcttcatccctccttacatatactttttgagcttattctaagaattcccgtatagactgttttttccagttttctagtttctgtaactttttttgcaatggcttgctaaatggctaccaatggctagctattggtaacaaaatgtagctttaacatttcttgcctgctagggtcttctggatccaaatgtgcatattttctcatttgttctcatagtctttttagaaagtttttagggctttcatcttttttctgttttatctaaaatgctcggggaagattctgagcacagggcactgactcctgaattcctttaattatcatttcccttatatctttcatgaatttttagtggactgtgtcgttatcccattgaggatcttgggtcgggaatttctggtctacaatgggaacgttttggctggataggtatttacgttcccaaactctcatagcagtcctgcaaatcaactgccttatatataatactccaatattacctgtaaagttgtcagatgtgtcataccggctcatacaagatcttttgtatcattttataaaacgatacaaaagctgcaaagccaccagcctgcctgcttcccttggagaagttgggacttcctgacaactgcacaaactcacgtgggggatttcaatatcccaaagcatgcagattcctggtgtggctggaattggtgctggggtgctgcgaaagccaggtttgaagcaggaagacaaaaaaaccactcacctgtgtcagcctcgagtgctgaagaacaaccgtgtgtgggccttcaaccctgtctgggtgggttctggacagtgggtggggacccggcgggagaagggaaaggtcgttgagggggcagggcatgaaaactgtcgctggagctgggcaagagggtggaggctgctttggaagctgggcctggttagagggtggaggtggaggtagggcctggagtttcaagcttcagccatgcatagactagtcagcttctggtgtgtgactagaacagggcttgttccctcaagcttcagctgtgcatagactggtcagactccgtagtgactagagcaggcagtcttctttagcagcaggttgatctcatctcaggatgagttggatgatctgggtcctgctggcttgtctacttgtcttgagctgccagtttcagctgactgtggtggatctaaggcacaacacctgcaactttaacagcagcgggactgaacaagattacagtatagggcttatattgtatgagtcttagagaagttggattctacatagctggtggccttgtagctgtgtcaaaaaaaagaactggctaaatacagacatttgtaaaacatagtcatgcttaagagactagggaaatgagtaacagtagaagaatttgtctttctctctctctctcttttttttttccttcactttgttctggaatttaaaaagtgtctagagcccattactttagccttagctttttggacagcgttatcttataactttccttgaagtgagctgctaagcagaagaaaacttgtttctttttctttttaacctttaccacaattctgtgggccaaagggatcaggagacagacatagagcagtagaaaacctgagacagagaaaagaagaatgagagagactcataacagatggtaaagtagaggaggggtgagggatttgccaagaggtgacaaaagtgaaaaaaaaaaaagataagaaagcaggaggagaaaagcaactggagaaatgtagagaaaagctagatgtacagagagatgaagaacagcaaggcaggaagaggggcagcaaaaagggaggctcatcagagtgagggagaggaggagggatttgcagccaggacagacagagcagagtggtgctggtggcaaggagaacagaggaagaacaacagcagggaacacagctgggaatctagggtgccagagagtgggtacagaggggtataacagggaagagataatttaacagggagaaaagaggaggtgcagagatgggagaagaggtggaaatatatggagattgaggatgattgaaagactggggagaaggaggaacaagaggttatataagttccaaggatgaagcagaagaggtggaagagaaggaatagaggtaagaagggaataaacagcagcagaagagaggggtacagaatgaggtgcagaatcccagggaaaaaaaaaaaaaaaaaa

SEQ ID NO: 138 - protein, 95 aa, Homo sapiens [sequence omitted]

SEQ ID NO: 139 - DNA, 2971 bp, Homo sapiens
  CDS (2187)..(2453)
ccggcacgccttgctggttgttatatttttagtaaaaacagggtttcaccgtgttggccaggctggtctcgaactcctgacctcaagttatctgcccgcctcagcctcccaaagtgctgggattgcaggtgtgagtcactgtgcccggccgacttcctgtatttttaaagctagtctcagtttggtttttctatcacttgctgcaagtgaaaacttcgcggatgacacagaatctgttataccctgaattctgtatgtcacttccccatcagctgttttgatctaggtggactcttgtttctgtggaaatcgaagtcacctttatgaaaattgagcactttggggccattgtgtggtcacataatttctttaaaatgtgttcagttttataggaaaacattgtttgatatttatataagttaaagagattattcagctcatgaaaggcacaaaggtagaagatttatagaaaaataaaatatgcttatggtggaaggtccaactgtacaaaagttggatgatttgtaagttctccctggtagattttctgagatctaatattccagaattgtgtttagtattaaatttcaatattatgatattggacttgtaccactgtaaggctaggaaattataaaaccagttcacattgaacataacaaaaggaaaagctgcaagctgtttttgttaagtgattcacattgatctctttcccacccaggttccaagccaatccagacatagacaagatgtggaagagggagcatgggatattgcatttattaatgataaagctaaaattagataatgaggcttatataggtgtaaaagtaggttcccttataccaagccccagaatcatatacccatctaaccacagacaacactgaactaagactattatatggcctgatcttgttaaagttacagcaaggaggaatggggcagaatgcattttctctgtaagcagcttatttccaaagagagaggagggaaagaaagtgttactcacgctcacttccctatcccaaacttaacaatcaagtcaattacatctgtcaatctaggtccaaccaggagacagaacacaccgtaatttaaataggctaagtttaaaggattatgatgctgtgatagaacaatataaatatgtttagagaatctaaactattctagggctgagggtgagtagccaaagcaggacaaagttggaagagagtccccctctggtgttcagactttattggagaagttgtggctgcacgacactggatgatgtggaagtttgctggcgtgcctcgggccagagctggtttagaattgtctgataaacaggaaacggtcctctgggacacaggcaagccaaggctagtgagcagattgcagagagagttaggacatttctgcaggtgtgaaactggggcagaacttatacacattggaaggacctcagaagccaacctttaggagaaaggaaagctgagattgacaggtgggcatacagagggagtcagggcactgctacaggtacaaggccaggagcatgtggggtgcatctcaagagggctgcagcaaggtggtcaccaggcttcctaggctgggactgcaaggtggactgtacattctgtgtgcagccggagcaaaacaccaccagatgcatacaccactaaccttgtgtgggagcaaaaaagaaaaaaaaatgagcacaccaacactaggatgagaaattcctttcctcctgcagtgcccctccaatgtcctctacttattctcattttaaaggataaatgcttattgttcaatctgttatcacagagtagatactgaaggatgagtttggagctgagaagtgataaattgacaagggggttcagtcagcccctttgactgctcagcttccatacgcacctttctacacgtgtttgaactcctgcacaacagagcaactaactgtattttggtctagcaagatacggttatcctgataactgaagctcttgctgttccccaaaataagacacaaagtttcaacagtcattggattcattgctggctgtattaattactcctcaattcagtcatcatgccacctaattttctgttaagactgaattgtaaagttgaccttcagcaacctgtataataaaaatagggagaatggcaaagtagaaaataaaaataaacacatgcttgcaagcaaagagaaaatatgcagagctattacagttcttggttttgtaatggtcacaaagttatggttgatatctatagcttccacctccaactacctctatatttccctttcccagtcagaatcagctgctctgggttctttgcctggtagagtgcttcaaaccttcctttttgaaaggtctgaatcctcaatcatcctgcccttttctgattcttgtggttttccattgaacctttacagttggacatggaagtattaagaggcactttagaaaaatctcctgggtaccagaaagtcctccttgcttccatttgcagaagcaaaccaatttaccttggaaattcagatcaatcactacagccaataaattaaccccctgtttttcatccgttggttaagtgttacaagaagtgcaaaatgaccaggtggcagtctgataagcagaattctgagatgaatgtcgtgactttccctctcttgtacacaccctgtgtaatctccccttgagcatggttgaaacctgtaaatataattggatagcacctccacgattatgctatatggcaaagggttcctaatcagttgactataatccaaagggagattatcctgcgtagatatgatctaattaggcaagttatttaaaagcagaagagttatcctgctggtctagaagaaaaacagcctgttgtgaaagtagggaccacagggacctgagggtgacctccaggagctgagagcagtcctcagctaacagtaaaaaaaaaaaaaaaaaaa

SEQ ID NO: 140 - protein, 88 aa, Homo sapiens [sequence omitted]

SEQ ID NO: 141 - DNA, 732 bp, Homo sapiens
  CDS (74)..(445)
caaatccagaaaagatccgttttcctaaccttgttcgcctattttattatttaaattgcagcaggagggaagcatgtctactttatccaatttcacacagacgctggaagacgtcttccgaaggatttttattacttatatggacaattggcgccagaacacaacagctgagcaagaggccctccaagccaaagttgatgctgagaacttctactatgtcatcctgtacctcatggtgatgattggaatgttctctttcatcatcgtggccatcctggtgagcactgtgaaatccaagagacgggaacactccaatgacccctaccaccagtacattgtagaggactggcaggaaaagtacaagagccaaatcttgaatctagaagaatcgaaggccaccatccatgagaacattggtgcggctgggttcaaaatgtccccctgataagggagaaaggcaccaagctaacatctgacgtccagacatgaagagatgccagtgccacgaggcaaatccaaattgtctttgcttagaagaaagtgagttccttgctctttgttgagaattttcatggagattatgtggttggccaataaagatagatgacatttcaatctcagtgatttatgcttgcttgttggagcaatattttgtgctgaagacctcttttactttccgggcaagtgaatgtcattttaatcaatatcaatgatgaaaataaagccaaattt

SEQ ID NO: 142 - protein, 123 aa, Homo sapiens
MSTLSNFTQTLEDVFRRIFITYMDNWRQNTTAEQEALQAKVDAENFYYVILYLMVMIGMFSFIIVAILVSTVKSKRREHSNDPYHQYIVEDWQEKYKSQILNLEESKATIHENIGAAGFKMSP

SEQ ID NO: 143 - DNA, 2590 bp, Homo sapiens
  CDS (77)..(2326)
aacgcctcgctcttgagaccagccaccaaaccacgaaaagtgactttcttctcgtgtgctctctacggcccttctgatggaagcagaaacagggagcagcgtggagactggaaagaaggccaacagaggcactcgaattgccctggtcgtgtttgtcggtggcaccctagttctgggcacgatcctctttctagtgagtcaaggtctcttaagtctccaagctaaacaggagtactgcctgaagccagaatgcatcgaagcggctgctgccatcttaagtaaagtaaatctgtctgtggatccttgtgataatttcttccggttcgcttgtgatggctggataagcaataatccaattcccgaagatatgccaagctatggggtttatccttggctgagacataatgttgacctcaagttgaaggaacttttggagaaatcaatcagtagaaggcgggacaccgaagccatacagaaagccaaaatcctttattcatcctgcatgaatgagaaagcgattgaaaaagcagatgccaagccactgctacacatcctacggcattcacctttccgctggcccgtgcttgaatctaatattggccctgaaggggtttggtcagagagaaagttcagccttctgcagacacttgcaacgtttcgtggtcaatacagcaattctgtgttcatccgtttgtatgtgtcccctgatgacaaagcatccaatgaacatatcttgaagctggaccaagcaacactctccctggccgtgagggaagactaccttgataacagtacagaagccaagtcttatcgggatgccctttacaagttcatggtggatactgccgtgcttttaggagctaacagttccagagcagagcatgacatgaagtcagtgctcagattggaaattaagatagctgagataatgattccacatgaaaaccgaaccagcgaggccatgtacaacaaaatgaacatttctgaactgagtgctatgattccccagttcgactggctgggctacatcaagaaggtcattgacaccagactctacccccatctgaaagacatcagcccctccgagaatgtggtggtccgcgtcccgcagtactttaaagatttgtttaggatattagggtctgagagaaagaagaccattgccaactatttggtgtggagaatggtttattccagaattccaaaccttagcaggcgctttcagtatagatggctggaattctcaagggtaatccaggggaccacaactttgctgcctcaatgggacaaatgtgtaaactttattgaaagtgccctcccttatgttgttggaaagatgtttgtagatgtgtacttccaggaagataagaaggaaatgatggaggaattggttgagggcgttcgctgggcctttattgacatgctagagaaagaaaatgagtggatggatgcaggaacgaaaaggaaagccaaagaaaaggcgagagctgttttggcaaaagttggctatccagagtttataatgaatgatactcatgttaatgaagacctcaaagctatcaagttttcagaagccgactactttggcaacgtcctacaaactcgcaagtatttagcacagtctgatttcttctggctaagaaaagccgttccaaaaacagagtggtttacaaatccgacgactgtcaatgccttctacagtgcatccaccaaccagatccgatttccagcaggagagctccagaagcctttcttttggggaacagaatatcctcgatctctgagttatggtgctataggagtaattgtcggacatgaatttacacatggatttgataataatggtagaaaatatgataaaaatggaaacctggatccttggtggtctactgaatcagaagaaaagtttaaggaaaaaacaaaatgcatgattaaccagtatagcaactattattggaagaaagctggcttaaatgtcaaggggaagaggaccctgggagaaaatattgctgataatggaggcctgcgggaagcttttagggcttacaggaaatggataaatgacagaaggcagggacttgaggagcctcttctaccaggcatcacattcaccaacaaccagctcttcttcctgagttatgctcatgtgaggtgcaattcctacagaccagaagctgcccgagaacaagtccaaattggtgctcacagtccccctcagtttagggtcaatggtgcaattagtaactttgaagaattccagaaagcttttaactgtccacccaattccacgatgaacagaggcatggactcctgccgactctggtagctgggacgctggtttatggcatcctgagacagttgcacagtgccagcggaggctgcactgagccttcatcgcccattgctttaggcctggagactttcatttttagtgcattttcattatttgggtaggtgacctgcttggatctagacagcatctgttcaaagtcgtagggcttataaagtggaatataagaatgaactaagtatgtttctttagaaaatcaaaccaacaaaaataaatccctaggctacttttgttaaaaaa

SEQ ID NO: 144 - protein, 749 aa, Homo sapiens
MEAETGSSVETGKKANRGTRIALVVFVGGTLVLGTILFLVSQGLLSLQAKQEYCLKPECIEAAAAILSKVNLSVDPCDNFFRFACDGWISNNPIPEDMPSYGVYPWLRHNVDLKLKELLEKSISRRRDTEAIQKAKILYSSCMNEKAIEKADAKPLLHILRHSPFRWPVLESNIGPEGVWSERKFSLLQTLATFRGQYSNSVFIRLYVSPDDKASNEHILKLDQATLSLAVREDYLDNSTEAKSYRDALYKFMVDTAVLLGANSSRAEHDMKSVLRLEIKIAEIMIPHENRTSEAMYNKMNISELSAMIPQFDWLGYIKKVIDTRLYPHLKDISPSENVVVRVPQYFKDLFRILGSERKKTIANYLVWRMVYSRIPNLSRRFQYRWLEFSRVIQGTTTLLPQWDKCVNFIESALPYVVGKMFVDVYFQEDKKEMMEELVEGVRWAFIDMLEKENEWMDAGTKRKAKEKARAVLAKVGYPEFIMNDTHVNEDLKAIKFSEADYFGNVLQTRKYLAQSDFFWLRKAVPKTEWFTNPTTVNAFYSASTNQIRFPAGELQKPFFWGTEYPRSLSYGAIGVIVGHEFTHGFDNNGRKYDKNGNLDPWWSTESEEKFKEKTKCMINQYSNYYWKKAGLNVKGKRTLGENIADNGGLREAFRAYRKWINDRRQGLEEPLLPGITFTNNQLFFLSYAHVRCNSYRPEAAREQVQIGAHSPPQFRVNGAISNFEEFQKAFNCPPNSTMNRGMDSCRLW

SEQ ID NO: 145 - DNA, 1440 bp, Homo sapiens
  CDS (114)..(476)
cggctgagtggcacttaagcgggccatgccatgcaaccttgggcgctgccaaccgtgggcgagctctgggtgtgcgggcggcctggcgcggcgctccgctgtgtcagcgtgttatgatgccgtcccgtaccaacctggctactggaatccccagtagtaaagtgaaatattcaaggctctccagcacagacgatggctacattgaccttcagtttaagaaaacccctcctaagatcccttataaggccatcgcacttgccactgtgctgtttttgattggcgcctttctcattattataggctccctcctgctgtcaggctacatcagcaaagggggggcagaccgggccgttccagtgctgatcattggcattctggtgttcctacccggattttaccacctgcgcatcgcttactatgcatccaaaggctaccgtgcttactcctatgatgacattccagactttgatgactagcacccaccccatagctgaggaggagtcacagtggaactgtcccagctttaagatatctagcagaaactatagctgaggactaaggaattctgcagcttgcagatgtttaagaaaataatggccagatttttttgggtccttcccaaagatgttaagtgaacctacagttagctaattaggacaagctctatttttcagccctgggccctgacaagtttttccacaggaatatgtatcatggaagaatagaggttattctgtaatggaaaagtgttgcctgccaccaccctctgtagagctgagcatttcttttaaatagtcttcattgccaatttgttcttgtagcaaatggaacaatgtggtatggctaatttcttattattaagtaatttattttaaaaatatctgagtatattatcctgtacacttatccctaccttcatgttccagtggaagaccttagtaaaatcaaagatcagtgagttcatctgtaatattttttttacttgctttcttactgacagcaaccaggaatttttttatcctgcagagcaagttttcaaaatgtaaatacttcctctgtttaacagtccttggaccattctgatccagttcaccagtaggttggacagcatataatttgcatcattttgtcccttgtaaatcaagatgttctgcagattattcctttaacggccggacttttggctgtttcctaatgaaacatgtagtggttattatttagagtttatagccgtattgctagcaccttgtagtatgtcatcattctgctcatgattccaaggatcagcctggatgcctagaggactagatcaccttagtttgattctattttttagcttgcaaaaagtgacttatattccaaagaaattaaaatgttgaaatccaaatcctagaaataaaatgagttaacttcaaacatttcagaaaacaaaaaaaaaaa

SEQ ID NO: 146 - protein, 120 aa, Homo sapiens
MMPSRTNLATGIPSSKVKYSRLSSTDDGYIDLQFKKTPPKIPYKAIALATVLFLIGAFLIIIGSLLLSGYISKGGADRAVPVLIIGILVFLPGFYHLRIAYYASKGYRAYSYDDIPDFDD

SEQ ID NO: 147 - DNA, 1263 bp, Homo sapiens
  CDS (310)..(888)
cgctcgctcccgcaactggaggcacggcagaggaggcagggccgacggcggtgggcggtgcgttgcgcaggctcgggcctcccgctcgccgctgcgttgggaccgcgcagcccggtgtgtgcagtggcctcagggatccggaaagtctaggactgaacttctcctaacatccagtaatggggacctggaacctgggcgtactagagtgccgcgcgtagggctccaggtcgctggcttctgcgctttcttcctctccaaagttgagtatctcctatctgtgtcctcatacatactgccgcctgaggtgccatggcccccaagccgggggccgagtggagcacagccctgtcccatctggtgctgggagtggtgtctctgcacgcagccgtgagcacagccgaggcaagtcgaggggctgctgctggcttcctgctccaggtcttggctgccaccaccacgctggccccagggctgagcacacatgaagactgccttgctggagcctgggtggccaccgtcatcggccttccccttctggccttcgatttccactgggtgaatggggaccgctcctctgccaacctgctcctgggaggaggcatggtgctggcagtggctggcggccacctcggccctgagggccgctctgtggctggtcaggcaatgctgttggtggtcgcagtgaccatcctcattgtagctgtcttcacggccaacacttatgggatgtgggggggggcgatgctgggtgtggcaggcctcctgagccggctggaggaggacaggctgctgctgctaccgaaggaggatgtctgtcgctgggccttggctgtaggcagctgggcttactgccgggccctgcatacacagcgcctccagtgggagtgacagttggatacagccaggcagggtttctgccctgccgaacactttccctcccacctgcctgctcctggcgccttctccctaggggtagactcttctgcctactgaagtgggtttgctgcacattgactggtcaggggcagagtctgggtgctgtcctttggccacgtgtggggacttgtctagaccagaatgaaagggacagggtcccagacacgtttgggggtcctgattctgggctggacacggttgtggatccagagaagaggcctagtctccaataaatcttaggaattttgcaggaaaaaaaaaaaaaaaaaaaaaaaaaaaaaaaaaaaaaaaaaaaaaaaaaaaaaaaaaaaaaaaaaaaccctgggg

SEQ ID NO: 148 - protein, 192 aa, Homo sapiens
MAPKPGAEWSTALSHLVLGVVSLHAAVSTAEASRGAAAGFLLQVLAATTTLAPGLSTHEDCLAGAWVATVIGLPLLAFDFHWVNGDRSSANLLLGGGMVLAVAGGHLGPEGRSVAGQAMLLVVAVTILIVAVFTANTYGMWGGAMLGVAGLLSRLEEDRLLLLPKEDVCRWALAVGSWAYCRALHTQRLQWE
